United States Patent Application Publication US 2008/0039413 A1 - sequence listing, part 18

SEQ ID NO: 2338 - DNA, 389882 bp, Homo sapiens
ctgggcaatatagtgagaactcgctacacaaaatacaaaaattagctgggcatggtggcgcatgcctgtggttccatctacttgggaggctgaggcaggaggattgcttgagcccaggagttagaagctgcagtgagccatgattgcaccactgtactccagcctgggcaacagagcaagatcctgtctcaaagaaaaaaaaaaaggttaatttaaatgcatttttattccttttagcgttgctgtattttgttaagtacatctctccaatagtctttatctattcaaggtatctactctggtagcccgacttaggttcatcttaattttcctgagctgttaaggacctcacagggccactactctaaagatattgtttctcaaactttagtgggcatcagaatcacagggagggcttgttaaaaaataggttgcagcagggcgcgggggctcacacctgtaatcccagcactttgggaagcctagacgggcggatcacaaggtcaagagattgagaccatcctggccaacatggtgaaaccctgtctctactaaaaatacaaagattagccaggtatggtggcatgcgcctgtagtcccagctactcgggaggctgaggcaggagaatctcttgaacccaggaggggaggttgcagtgagctgagattgggccactgcactctagcgtgagtgacagagcgagactccgtctagtctcaaaaaacaaacaaacaaaaataggttgctagcccaaccctcagaatttctggaatggagttctactcactgagtaggtcttgaatggagccccaaaatttggatttctaattagttgccaggtgatagtaatactactcatccaagaatcacaatatgagaaccactgttctaagtgatatctatttgcttgttttcagaagtaagatagttgagatcacaagaagagttgaggaaaccaagaaagaattttcttattcccatgaaaatctcaggcctagttctgtgtattcatgtattcagcgccatcttttcccttctgcagggttctggtattgggtgtcttttttttttttctttttctttttctttttttttttgagacggagtttcgctcttgtctcccagactggagtgcaatggcgcaatctcggctcactgaaacctctgcctcctgggtccaagtgattctcctgcctcggcctcctgagtggctgggattacaggcacccaccatcagcattttgctgcccgattcttaaatattacacacagccaacgaatatcagaagtttgagggaagtctctcttgtgggagagagaaattgaaataacaaaaagtgaattggtgaaaacagagactaaagaaggaaaataaaactatatacagttagacatatttactatttctagagttacatgtgagatacatacatatatatgtagtcaggagaaagttgcaaccatgaaacaaaagcagacagaataattttttttaaaaagaagaaatagtgttcaggatattaaaaaaagagccttaggattgaaaataggaggctgggcatggtggcccatgcctgtaatcctaacattttgggaggccgaggtggatggatttcctgagctcaggagtttgggaccagcctgggcaaaaccagtgaaatcctgtatctacttaaaaaaataaaaataaaaataaagaaaaagcaaaagaaaagaaaatagaaaagtagaaatgaaaaaaaaaagattagaaaagaaaattaaggaaatttaagcagaaagacagagaagaccagttcaagaagttcagaattcaaatagtaagagctcagaaaaaaaaaaagtaaatgaaataatctaagaaaaattctctgaattgaagtataaattaccaaattgaatgaattcatcaagtggacaccacaatggataaaaatagatctacaccaaagtctgtgatcaggaaatctgaatacacagcagacaaagagaagacctttaagcttccagacaggacacaaaagaagacaaatagaaaggactgaaagtaaaaaatggaatccattgttttacaacaacattggaagcaagcgggcaatggaacgagactttcaaagattcttttttttttttttttgagacggagtctcgctctgtcacccaggttggagtgcagtggctatcataagtgcagtcacagcacactacagcctccaattcctgggctcaagcaatcctcccacctcagccttcagcatagctgggacaagaaatgtgcaccaccacgcccaccttccaatatgcacatttctaatagctagctctcacgttactcactagaatgagagaagcattccaaacactaaatactttttggaatgcatccctgccacgtatttgaaaaggcaggtgcagacccggtgaggtggctcacactggtaatcccagcactttgggcggctgaggtgggcggatcacctgaggtcaggagttcaagaccagcctggccaacaaccgcatctctactaaaaatacaaaaaaattagccaggcttggtggtaggcgcctgtaatcccagctgcttaggaggctgaggcaagagaattgcttgaacctgggagtcagaggttgcagtgagccgagactgcaccactgcactccagcctgggtgacagagtgggattctgtgtcaaaaaaaaaaaagaaaaggaaagaaaagccaggtgcctaggaactaagccaacaaacagaacttattctaaatctgaaaaaagactagatttcttattctgctctacccatttaacctgtccttgtttggaatttaaaagtttgaaaactgatgttgagtaccaacagggactgaagacaacccattagaatgtaagctccatggagacaggatttttttttctagtttttcattagtatagtccaagcatagaagacagttctggcacaaagtatgtacttaatatatatttattcaattgatgaaaaactgaaagaataaattaatggcagaggcagtcaggagtctacaaaatagcagctgaatttataaggactcaagcttttgaaaaattaaattaaatcatcattcataactttctactgaccacctttacaaccaaacctgcaaaagaatggtagtggatatttgtcatagtccaagatgatgaatgaccatcatctttttaaacaacttttttttttttttgagacaaagtctcactctgtcacccagggcagactgcagtagtgcaaacacagctcactgcagattcagcctcctgggctccaacaatcctctcgcctcagcctcccagatacctgcaaccacaggtgcatgctaccatatccagctaaattttaaaaattttttgtagagatggggtcttgccatgttgcccaggctggtttcaaactcgtgggctcaagcaatcctccccttggcctcccaaagtactgggattacaggtgtgggccactatgttaaacaaccatactacattaaaggactttttttgtggtattaaaggacatgctcaagcgattctcctgcctcagtctcctgagtagctgggactacaggcatctgccatcatgcccagctaattttaaaattttttgtagagacagggtttccctgtttctcaggctggtcttgaactcctgggcccaagccattcacccacctcggcctcccaaagtgctggaatcacaggcataagccactgcatccaacaattcttttaacaacagctatcctttccctattctcatcatatgactggcaagtcaccaaatacttaagtttttagtctgtacaagttttactttactggcaaaagggaggattttttcaggtgctttgatgtggtaagtattctttgctttttgatttttttcttagagcatctattttggaaataattaatccttaatctgtgggagtagcctacacaaatctctaaatatgtaagctgacttccatcatgccattacaagcacatgagtccggcactccttccttaaaaaggtacccaatatggccaggcgcagtggctcacaccggtaatcccagcattttgggaagccgaggtgggcagatcacctgaggtcaggagttcgtgaccaacctggacaacatggcaaaaccccgtctctattaaaaatacaaaaaattagacgggcgtggtggcgggcgcctataatcccagctattcaggaggctgggacatgataatcgcttgaacttggtgggtggaggttgcagtgagccgagattgcgccgttgcacttcagcctgcaacagagcgtgacactgtctaaaacaaaaaacaaaaaacaaacaaaacatttgggggaccaggtgcagtggctcacgcctgtaattccagcacttagggaggctgaggcaggcagatcacctgagcccaggagtttgagaccagcctgggcaacatggtgaaactctgtctctacaaaaaaatacaaaaattagctgggtatggtggtgtgcgcctgtgatgctagctactcaggaggctgaggttggaggattccttgagcccagaaggtcgaggctgcagtgagccgtgactgcactactgtactctagcctgagcgacagagcaaaatcctgtctgaaaaaaaaattgttttgaaaatttcattactgatgtcttagtgtggttttgggaaggaacaaaatttggagcatgtgttcaactgccatctctacctagaagtgaataacaattcatttctcaacacatgttttttgagcaatttactacttgctaggcactgtgccaagatacacacagaaatatggaaaaaggttattaattcattttttctgattaactctactaagttaaaaaaatggaaatatctctccaagtttgatgctctagattgtttagcagtttttttcctttcctggcctctgaatttgtctcgattttggtgtaaatgtgtgtttttataaaatatgaaaggagattctaaaggggaaaaagatactgagtgtaaaagatattgagtgacaattggggggggcatgtcctcatatccgaatatagcattcatataagccatctaagtgtcttaaatagtggataaaaatgatattggcaaggagtagagaactatttttatctatcaacattcagagggaaaagacgaaatctctaccaggaaataccacaacagtgggaggttcttgctggctggtggaaaagaatgcggagagtagatggttggtcattagtagaatttggctcatgagagagtaaaaagtcttggcttttagttcatcaatgatggtagtgccatgaactgaggataatacttattaaactcactgttacataaattatccctgttagtcacaaggggacagttattctccttttctcttttctgagacagtttcattcccattgcccaggctggagcgcaatggtgcaatcttggctcactgcagcctccgcctcccgggctcaagcaatcctcctgcctcagcctcccaagtaactgagactacaggcgcatgcgaccatgcccagctattttttgtattttttgtagagacagggtttctccatattgcccaggctggtctgaaactcctgggctcaagcaatccgccagcctcagcctcccaaagtgctgggattatgggcataagccactgcacctggccagttattctcctatagagcagaaagctaccatacggtctactagccgtcaacctcggatcttagtggataacgttaggaggccagtcacttcatccggagagtaatttactacccccgctaaacacctgacttgattctcttctctctctccttctcctcttagcttcctagaatacttgtcttctaaaaagggtccaaggttaagtcaatctgccaaggaagcaaaaagcccattgctttagctacttttccttttgactataaaggtttctctgggcaactctggtgtcccataaaatatgcatgtgtgttcaaggatgaagtgtgtgtgttgtgtgtgtggggaggctgaaaccatgttgacagaattcctgtgtctgtccagtagtggattacagtgaatggacagtgaactaagctctattagattgctgggcatcgtggctcatgcctataatcccagcactttgggaggcttgaggtgagaggagcacttgagcacaggagtttgagaccagcctgggctatatagtgataccttgtctctatgaagaaaaatttaaaaattagccaggcgtggtggcatgcacctgtagtctcaggtatttcagaggctgaggtgggaggatcacctaatcccaggaggcaaacgtgcagtgagctgagattgtgccacagcactttaatctgagcaatagagtgagactctgtctcaaaaaaaaaaatctattagattataactttcttgagggcagtatgggttttagactttctgtcctgaaacatttaacaccatgcccggcatgtgagaaatgcacattaaatacttttcaatattaacttatcgatagggattaacttatactacacaaatagtactattaattaacactgaatttgtattacttagttgtttctctctgagcttttcaataaaggcttctggccctatctagatgtgtcagcaaaggcccagaaatgagttataagtgatacaaaactccactttttatattctttttgtcttctatataagtcagagctattataggagattcactggtgggaatcattttctcttattaaaaatgacacaagcaaaggctatattatgaaaaataacttcatgttataatgtcaaatgaatgatagctttaattccagctcctcctttttgggtctactatgctcttggcactacgttaggtgcatggtactgacagatgcatgtcagtccgaaccctcaaggggttcacaatctaataaggaaaataaattataaagtaaaactatacgggccataatagatatgaaaaacttcaccaatcagtccctaagtaatgagggagcccctatgactgaaggtttgggcagacagatattcttcctctgcactagttgtgtgagcaggatgagaagagaatcttgaaaacagcatgaatccaacatgtgggatcacataccttctccttctgcaagatttctttccagttttactgtggagtcatagaatcttatcacagtgctatggtttcaatgtgtctcccaaagttcatgtgttgacaacttaacccccaatgcaaaagtgttgagaagtgagacctttaagagaaacttctaagagggtagagccctcatgaatggattactctctattgtgtgtgctcacttgccacgggataacacggcaagaaggccctctaaagatgccagtgccatgctcttggacttaccgggctccagaaccatgagccaaataaacttctttataaatcactcagtctatggtattctgttagcagtaggagaaaatgaactaaaacacatgggaatggggccttaaaaatgatctaatcagacttcctacctgacgtttatgtctttgctactaaaaaaatggtcattggggtggtactgtgtagaccacactagattacagacaacagaaaattcgaatcctattggtctaatcagtgaagatagacctgaattcagaagttgcttgattcagagcctcaaaaatgtcaccaaagccaggcacggtggctcacgcctgtaatcccagccctttgggagcctgaggagggcagatcacttgaggtcaggaattccagaccagcctggccaacatggtgaaaccacgactctactaaaaaaataaaaaattagttgggcatggtggcgcgcacctgtaatccctgctatttgggaggctgaggcaggagaatcgcttgaacctgggaggcggaggttgcagtgagccgagatcctgccaccacactccagcctggtgacagagccagactacatctcaaaaaaaaaaaaaaaaaagtcaccaaagatcagatctctatgcatgtttgttttcttgatgtcttctttattttaacccggctagacttgtatttggaagatggctacccaccatccaggggacccgtttttttgaggacatgcagaaagaatgggttacctctgaagcgctctcagaaaatgaaagaaaaacttttcccaacaaagaccaggaaattgctcctctcattggcccaaatatgttacgctcattgccagccaataactgtggcagggaatgggattctgctgatttaggttggaattatgctacgttgcttagattgggaccacatgcccctgtaagtaggcagagcagggatgtgactcagaactgggcttgtttaccaagataaggaagagtggatactggggagtctaggccaccataagtttcaggtacagccaatgcaaagccttggaaatccacctgacagctccggttgtaccgtccgccctccgtatctggggtttccaaattccgggattcaatcaactgaaaacaaaaaatgtagttaggcttaccaggcctgaaaatacatgaaaatatagagcctaaaatatagcctgaaaatgtactgaaaatatagagatttctttggatgattatttcctaaatacaccttaacaactattcacatagcatttgcattgtattaggttttataagtaatctagatatgatttaaagtatatggggaaacacaccatttttatgtaagagacttgaacatcttagaaaatccagagtctgggaaccaatcccacggatatagagacaactgtactaactacagtaatggcatatggtagctgaatctacctctctttccatcccagtccggaatccaaaggctccttcttgccatgttgtcctcgggcgttggctgcttcctcccatttgttactttggaagtgtcttctttcctcagtgtttcttctgcgtgggccttaccggtctttactgcactcacttacctaagaggcaaaacaatggctgccattcaagaaaatctcacttcagcccagaatcgaagaactggggcttattttgtcttctttctactctggggcttctctgaggccaagttcagaacttgtgcacaagacagtggctgtgtgacagagccacccagggctgtctccgttagatgaagagactggcttgatccattcccaagaactagtcccacgtgcagttcggttgctccgaatgggatttgggtgcgaggggctgactggagatgtggggtctgggtgagtggggtatttgagaacctgaagctcacaaggctttgtctggtttgaggtacgttttgccctttctcccgcattcggctctgcatcgaatctgaccggccgcgcctactctcggaacggccgaggaggatgggtctcccgtctccacacgcgcggtgtctgcgccgactgcagccctcctggacgggagcctctgggcccagcttagggtggcgtccagcgtgacctactcgggaatggcagccttcagtgtcctgcggcctcgggttccgggaagctcggggacctgggcagcggatccagatgcttccacagctgtgtctccgtcgctccgcttcgggggccgagaaccagcaagaccaacgcgaggaggcgccacggtacctgacaccccgctcccaggaggcccggacgaggcttcgtcggcgagcggtcggggcctgcttctcgaggtgcctgcgagcgcctcatgcccctccccaccggccccaactccgtcccgcctcacccgaccgcgggctttgtccacccgccgcggtgcggctcctcccagtccccgacagctcctccccgccccctctgccggccccacttcctaggcggcggagcgggtcggggagggaagggttaacccgcggctcttcccggcgcggagggatccggaggcgagccgagcgcggtggtgaggccgcctcagcgaaaaaaatgtccgcctgaagagacccacaagttctattcggggggaccgacagcccgccccgggaggaaggggcggccaggcccgaaagccgcctccccctcccagacccgagagctcgtgcggggcaaagtgaaccgagccgctgggcggtgcaaggggaagcccaagcccgttctcccggccaaagtgaactttaatcggggtggttggatgcggagacggggcggcaggtaattgcgggctagcgagcgggagtggggcggcgcggcggggctgggggctgcggggcgccgccgcgtccctgccggagtgggggcgcccccgtcccccgcctcaactccgcgcccctttgtacagcgcgaaacccggggtcccctccaagttggggagcggagtgggggcggaggctcgagtcgcgggcgctcaggcccgctggcggcgcgctcggcctgtgcgccccgttcggtgcccgactcgggccggcgcccaggctccggggcgcgcgggagatcgggcggcttcggccgcggagccaggctcattgttcggcaggtccggggcagggcagcaaaagtgggaggaggccgagcctggggaggaggacgccggccgagagcgagactagttgtcggggtttctgttttctgtttaaaaacgccccttggatgagctgggggtgctttccgacctcctgggcccgccggggacgtccgggcggcggcggccgcagacgcgggcctgcgagcggcgcgttccctgcaacttgtcagttctattgttgccgagcgagtgagtcacttcgcatctccgctcgccgccgctccgctcgctggacgccgaattgcccctcaccccgctcctcgagaccccagccgcggccgggcccggcgcgcggagcacccggcggcggcgcggagcagggggcgccgaggaggtggcagagactggctcggaaacttgggggagaggcggcgagttgcgggagccgccgcgtcgatctcgggccgcggcgaggaacgcgtggattccgggacccggcgcgggcactgagccctcccgccccttgctcgcgccgcggtgggagcgagtcggggtcctggaagtcatcccggcgcccccagcgctcttgcgtaatcttccccagtacctctctctgttccctcacacactttgggcctcggtggtctctcgctgagcccgtttcctctgccctaggacctgctagaagtggccgaagatgaatccccagcaacaacgcatggccgctatagggaccgacaaggagctgagcgacctactggacttcagtgcggtatgagagctttccatggcatcttggggttctgctgaggtttttgtttgtttgtttgtttgtttcttttaaataaagggtgaggggaagcaacgtggagactaggcagcgtgaactccatctgctttctgcttaagcagtagttctcagggctggagtccagctcccccaagttggacacctgaactttgatgtaatgtctagacttgcacatttaaaactttaatgccagaggggtcatttgatttaaccagttaaaaggagaacaatgtaattatgacctttggttgagtcaccctcccaccgcgatgattattggggatcttgtactttatatgaaaaagtgttgtttttttcttcagtactcctcaccattttcctctccagtatcagatgtagtttatggtacctgaaagatgtcagcgacaagaaaagtagtccagagctagaatttcgagccttctgaaacagagtacttttattttatacacacacacacgtgtgtgtgtgtgtgtgtgtgtgtgtgtgtgtattatgttcttaacatgggaaatgacttaaaaacatcaactgaaacctaagggcccactgcttttatttttaatgggtttaattcctttattaactgctgttaggaggcagcacctatacctgctttatacaattcagttataatccttactgtatgtagtaatttaatgggccataattctgactgtgtatattgagatataatgtaaatgtaatgaaattcacttagttctgcagtaaagatcatgtgtaatactatactgtttaaacttaataatcttggactcttccatgtaaatgatcgggtcttcagaacaaaatgtaaccattatttccaattaattaggaaatagtatcattcagtgtatttgcctctctggatctgaatgtatctccaattttattttaacttccctctgaaatttaataactgatggatgacttttggtggacttttgtttgcaaggaatctagaagaatttcaggactaacagatatatttgggttattttgcagatgttttccccacctgttaatagtgggaaaactagaccaactacactgggaagcagtcaattcagtggatcaggtaagatgatgtcttaaactaaagactcatattttggtggtgtgatacattttagtagaaaaatagaaagcataacatttaaatattattgaatatatgtatataaaagatggaattgagtcaagtgataattagtaagatttattaattttaaaagatgacagttccctcagaaatctgtaggaaatcagtagtttcgtttacaattatttaaaatgttagtggggtaaattttcaaaatgaatagaaacttagatttatttttaaatgataagtattagatgactgaatcctttcctatatccagattacattatgataatgtttagagtaagttaaagtagatctacacactagtgatcttgtctttaaatttactttcaatacatttatgactactgtgctccattttaaaacatcccatttttcttaagtatgcattttttctttttttaacttttaaaaactcataatttaaaaatattttagaaggaaggtccattccagtgtgcaaaagctgtaactttttatttaatttaaatttatttctttgtgcttaagagatgaaaaaaataactaaagccatgacagcatcatcttaagaaaaccaactgtcaaatctctgggctgaaactcagtaatgcctctttgatgggtgctttttatttcccctggtaaaatgatagttggtttcttaaaatactgtgagaataaaacatcagaaaataaggttaatttcataaccacctaaacactttataccactttacattctaaaaagtttgtttttaaaaattgtatactaatttattaaaattcatttttaattatgaaattagagcttatggggaaagtatagcatgtccttaatcatcttaagtaagtgaaatgaaggcattttttggattttaagtagggtaaagactagtattattcttgatcaaaaggacatcatgaaacgataggcaagtcccaactcttctctcacctccttccttttactggtaatcatttgaaaattgttactttttggggaggggggagaaaatttaataatcttaaagttgtagaagatggctgtatttctttactggtgttgatacatctcatttttgcaactaataattcattctcaggaaccttcagatttactttgactaatacatagtagatgatgcttagtattttttaaaaatgagtcttgatattactgttgcctactgttccagcttaagttatggtaaatatatataactggacagtcactgatacaataacatgaactccaggaacttgctgttagaagtgcattctatttttagaataaaggcaattacatttatttcactttttaaacttaagaaggatttatgtagtctgtgaaattaaaaagtatgtgaactgggatatagattataagcatggcattggagcaatttttggacttcagtacgttgcattgcacaaagaaaaaattatttttctacattgcgaatggtcaccatatttgattatttggagtaggaacttttagttttaaaagttagatttgttatccattgaaaggtttgaacttacacacctgtagtcagtggacttagcaatatttatctgtgtgttttgttttaaatgctacaaaaaattgtaataaaaaagctgtgacttttaattagtgaatggatttgaatttggggaagagaaaatgccatgtgattttttttcaaatcaagatgtactggtagatataatttttctgtggccagttcttaaagggaatgtctaaaagaaattggtatagtaacattattttacttatatattttatatttatataccttattgacatttgaataaccttctgccctgatttcaaaggatattatgtaatacactctaatgcctatgtatttgcagctattaaggagctaaagatctgactttccttttgaagagctgctgtagtaaagattagggttttttgtttgttttctgttttgtctttggagtaacatttataaaaactacatgccatttgacttatgaaaactagagtttatagtcaggtattgtaatttcctttcttatttgtcctttttgaggaagactcaatttcacagtgggctgtttttgagaaacgatatataatactttcagaagcttttttagctgaaagaatatatactatagcatgtgatgttatctttaatcttattcctgaagcaaaacaaataactcatcatggctgagttatttatgagtgtcggaagtcactctggaaaagataaaggtgtgtttactactactaatttgtcttgaggatctgttatgttattccttcatcagggtgttaaaattttcttcacgttatggtgagagtgaatttgttcacttggtatgataggctctgtgaagtgttcctaaagtgaccttgagagaaacttttctttctgtaggagtgaaaggtcaggcactctaattagggcagtgtatagaaacaaagggcagtgtatagaaggaaagttggttaaaaggattgacaaaatggaaatggttcagatgtttaaatccatgtcctcaacttcggggtttgagtgtgtatgtctagattgtgattttgggttagtttttagtagattgtttgtatgatatctgaaaatttcctttgtttttgaatccaagtagtaagggatgttgtcattttgtaagccatctgtagatattgagcatctctctggtgtttctatctagaatgtcattttaactattaagtaaagcttcactttttcttattgaattcagacgtttgtaacagtatagtttctttttgcccaaaattttcagagataattgtaggaagtattttctggctcttaatttttaaaaaggaatacagtttttcatttttcagttactgatctttttttgtggggcggggggttatttttagatgtacttacaggctttttgaaaatattgacatagggccagaaaaatgaattctcattaaattactcttcagtatttctatttttagatagttgtagattcatatgcagttgtaagaaactatacagagattctatataccctttacccagtttcctgcaataatagcaccttgaaaaattagtacagtatcacaactaggttattgatagtgatacagtcaagatgcaaaaactgttctgtcaccacaggaattcttggtgttggccttttgtaactgcatccacttttcaagtaattaaaaaaatggtaagattactaaatgccttctttctctgttaaacgtggagtaagcttttcaaattgctgtagcattacttgaacatatcaagaacaaaatcaagagaaaaccaaaattgtaccactgtaggtttttactgaactgtgatagaaataggaatggtgattttagagaggaaaccaggtttgacctttcacttaaggtattttaaggttatgagtagggtgtggttcatattatgtacatattagtgttgaaatttataatagctataatttgtagtaaatacatacttgttaatattgagccatgttagacatttgtttcaggtaagctgtagttattaatgagagtaaccacagagtcagcaggtgtgtggggaaaaatatattttaggacaaatatggtctgctattaagttgctcatttaaggtaaaaggtagcaagggagtcttttagagaaaacctgtttatgaaaactcatacttggaaaacataaaaattagagacaagattacaaccatgagtattgtatacttttcaggacaattcctgaacaattgaaaaacaaggtcgggtgtggtggctcatgcctgtaatcccagcactttgggaggccgaggtgggtggatcacatgaggtcaggagtttgagaccagcctggccaacatggtgaaaccctatttctactaataatacaaaaacttgctgggtgtgatggtgggcacctgtaatcccagctactcaggaggctggggtgggagaattgcttgaacctgggaggcagaggttgcagtgacctgagatggcgcagccagtgtactccagtcttggcaacagaatgagactctgtctccaaaaacaaaaaaaaaccacaaacaaatggtgtccaccgcccccccacccccccgccccaaccccgtagtcattgcttataatggatttgaaaaacaatttgattagatcacaacattttaggggcttgtttattatatatagtgaggcatacctacaattactgtttttgttttcattagccatttaaacacaaattcaagtttctgtcttcaaggtatcctttgctatatctttgagtttttaaacaagccttttgaaatgagaagataaagatgaagatatccaaccttgactataaacaactttcaaattttatacttaattgggcaataaacaatgctgtcttattaaagccatatagtcttttctgctcttaaacaattggtagtcttttcctggaatgtcattgtctgcctagtgttgtcaaagacttgggtaatcttgctgaaagaaagtaaaagtagcactattagaaaggctctcctgaaaaagaaaaagaagtgctatttgtggacaatgtgtggaatgcctttttaaaagatcatttaataagactgcttttgggtatcacttgaaagtatgtttatggatgggaatgttgaaattgcaaatctaaattgtttgtgtttagggaagataatgagaagacaaacacttaaatatattcaaaagactaatgaatgacagtctgctttgttaaatagttgtgccataagtatctcatttttatcagttaactatttagtatttacctatgcattcttctagcagtttttgggaagatgggaaatggagaaggtcattgctcagaaaaagtggagacatttcgttggcgtggtggctcacgcctgtaatcacagcgttttgggaggctgaggcaggcagatcacttgaggccaggagttggagaccagcctggccaacgtagcaaaaccctgtctctaccaaaaatacacagaattagccaggtgttgtggctcatgcctgtagtcccagctactggggaggctgaggcaggagaattgcttgaacccaggaggcagaggttacagtgagccgagattgtgccacggcactccagcctgggtgacagagggagactctgtctcaaaaaaaaaaaaacagtggagaaatttattattttgatgggaagtaaaatactgaggtaaacttctctaacatagaaaatgtcaacaaacacacattattgtagtttaaattgagtccataagaaagaggctgtgctgaagagtcagggaactggcttaaggaaaactcaaaaatgttgagtttagagttgacttgtgatggagatatggacaatgaattagggaagagaagaactggtcttacagctgaggaatagcatgaggagagacctggaaatgggaatttagcttgatccaagggcctgtacagttcagagagagagaagctggtttttattaatcaccactccttaattcctgggggagctcatatttacatattattatctggagctggactacaggtgttcagatccagaaattaccagtgaatagcacagtgatcttgggtatgttcctttacttgtctgcttctgtttcttaatctataaaacaggactaataatagtcgttatccttataaggttgttaggagtgttcaatgagttaatacatgtaaagttccaagaatagtgcctagcacatagttagctgtggtggagtaaattgttagtggtgagacactaaaataaggaaggcatttatttactttggaggcctttatgctaatctaggatgagctggtgaagggttagatttggtgttagtgtagggaataggaaggaaaaataacagaagtaaaggattgttagaatttgagggattggctttctgtaggtaagagaaatgactcaagattgcagttctgacataattggaggatagtagtgctggaggtagtaaagatgctgaattgttttttgcattttatatttcacatgacctgggactcttctggctaatttggagatgtatgagggaagcatgctcggtaaagatgttggttaaaaagaagaccgtcttttttctgcatataaagttaatacatagtcataattgaaaagaaaattagagaacagaaaaagcaaaaggggaaaaattagctttatttcagtatccagagaaaattgatttatttcctttttgtctttttttcttatagttccgtttgcaaagctggtaacttaatgttagttcatttatgtcctgttttttgtttcacttaatcttctaccattaacattttctcctgttattaacttggcttaaaatagttgcatgctcttaaatggaatgaatatagcataacttaacaaatccattcttttattacttgacctttatggatttttgttaatttgctttttgatatgataaataatgtggtactgaccacctttttgtgtatgtatatgtttttgcccacattctgatttcttttggttaggagatgcaaattttgttttttgtgcctacaagttaataattaaaactaatgaattcccttagggaaatgaacacagagggagataaattatcaggccagggattgatgttaatggtggagttacatgtataaaattagtgactttggttgattatttaatgtaataatacaaaattttattagtatgtgaatggaatgcattatgacatttggagcacatttgtgcttgtatacaaatgtgttgtgtggtgactggagggaattcctgtcattctttgacctgtgcttatagaaatggagtggagtctaattggagtcttgtcagtgagagagcccttgaattcctgactttttgtgagagagacaatatagtgtattggaaagaattgggctcaggagccagacaactggattggaatcgatgacttgcagcttactagctggatggccttaggtgagatatttaaataatcagagctatacttttttcatttgtgaaaagtgggtaataatgcccacctacagaatccttgtgaagattaaataaggttatctatatatttttttcctataaagctgcttaaaaaatggtagctgctattattgtggtaccttctaactagcattctcggtaatactagtgattatattagaaatcattataaagccagtattatagctagtgtttattgaactcctattatatactaggcattgtgataagcaatttatgggcattatctcattttactttggataaaatgaaatgttttgtctgtggtgttggaagtgaggcaatacccctacaagagcaacaagtcagagttgcttttagtgccataaaattgtgtatatgaagtctgagaagtaatcaggcatacaagtagttttgaaaagtcatgaagtacccaggaaccttaacttttcttttttagttgatttattcttaatgttattattttgtagactatactttgtagagtgcagaataatgaagagaatgtgtacaccttttgaaaatccttttccatgcttaggcatcaccgccacttgaatgtagcattttgtccatattctttctccagctacttgaaattctttctggagtgaggcatagtctaaataattaagtaaaataaaaattacttgactggaaaggatagaacgcctgggaacaggttggagagaatgttaagagtctctagggtagaacgtattcactttttttcttaatggcagagaagaaggaacataaactcccttggtagcctgaagcagcacgttgcaagtgagtggaagaaattgtatcttaaaaattcatgtacattttattttctacttgctaccacaaacatatctgtagtaatttaaatatgttttcattaatcattgagtaaaactgaagttctaaagttgcatcatttttgggttatggcattaccttcctcctgttttggtttgtatctttggggataagggtcagggtggaatggaatgctggccaatccttaatgagaagcccaactctagagcatatctttagctgtattttttcatgcaccttttcttgctcctatagaagcctgtaaaaagggatcattacatcagggggaaaaatggttttggtagaaagaaaactgttattttcataaactgaagcacagatagttttgttaataacatgactgttatttgaaactttcttgtttccagccagatcattctgtaatttttaaagatacccttgacttgaaaagaaaatgtaatttttatagagagagctttggtttttttttgttccatgtttaaaatgtgctctcatgtgttccaggttaaaaatgtgctctcataaagaccatggtgagtcatccaagctactgtaagctgcttggggacctaaagatcacatttaaagatcccacagaaaagaaaatgcattagagattggttactaatttttattgcagtgggtggtgactcagggatgaaaccttcaaaataatataataaaacaatttgagataaggtacaggacagaaaatactacctttttttcccttaaaaaaccactactaccataacttactgtattttggttattaaaattgggataatttggcccaagatgtcattttatcagctctgtggtgttaggaaggtgcctgaatttgaactgagggagtttctctaaatttgtggtaatctatggaagatcattctagttgccaaatggaagtctctctggaggcggcctccctcaaaagttgtcagtgtatttgcttctgttagttttgcctgtgagctatttccaggctttaaaaatgaacaagattgactcataattactctttcatcacttcattggtagctgatacagtgaacacaggttggacttaatataatcatggctactccagtcagtgagtgaatgtgctgctgctgtcggcaagagttgtgaatgttggttgggcatggaaggtatctctgctgggagggaattacagtcatccagcttcttggtcccagaggcatatgttgttgttttgaggtggttggggatgaataagtggttggtttgtacctttggagtgtaaaaaatgctaggctcactttaaacagtagcgtggtttgaccacaggtcagtttagaaaatctgagcttatatgggcacttgtgccaagggtaagaatctttgagttctcctgcaggatccttttaggtttttcctatttggaaaccccactatatctagccaactttgtcatgtggtccggaggcccatttacttaatctacttggtactgacatactcggattttagaaaatgttttttagtgttattctcagttgggaatagagttaaagggaaaagtgtttcatgttgaatctcttgataggaacatataagttaaaatgattgtaactttccaattaggtagataattagaggcattgcaagactgttctaagtatccttaatatcttttatctaagtatcagctagttttttttttattctaggtgatagcatattttatttgtcaagatccccttttcccagttagagatccacagtcccttatctgcagttttgaaatccaaaaagatctcaaccacagttaacttcagcatgaagtattttgatggctaaatctgatcttatctgaagggaggccattgacattctctattttcctagttcctgtgtggttgccagtagctgatttgtagcgtgtgacatatatacctatatactatgtttcctttctaaaatctgaaaaactgagttctaaaacccacctggccccatggattttagaaaaggtattatggagatctgtctctctctctctcctcctcctctccctcgttccttcaccccccaccccagggattgttttcaactcacagtaagaactttttgttctcaaaagtctcaactagagacttcatcattttaaatacagaaaaaaaaattgtggtggacttgtttatataaagcaaattcttcttggaatataagcttttcaggctgagttttattctttgagtagtccacccaatacattgatttagggaatcaagatctgttttgaggagagagaagctttctcatcttttgggccaaggagtgtgctgatatttctctggtcagttaaagcatgcagagaaattttcagggtaaaaatcaggagtgtagaattcttttcatttggtccccattttgtatatataagaagcattatatgatctctaccataaggaagcctcagccctgaccatacttttttgaatttttactgagagcaaacagttaagaaaatcctaatcatcttcaagaagaaaaagtagagccaagatactttgctgtagggaacagacaaaatcagtctttggtaaactttattctttccttttatattggtgaaaagttttcatagattagtagcatgatgcttattcctgaaatatactcattacaggcatcttaattaaaaacaggttatgattctgttgagtgtaaaattttcctcaggagcttgttattggctcagacccactactgtttaatataaactaagaaagtagtaatgaagtgtgtaataaactagtttgctgtagtctgttttgagaggtagaccagtaagccattgacttttctggtggctttgcaagcctgttgcttgtactgttgctagtgttattgtcttaagaaccatgatacaatgttgaataattaaatccacttaaagtttgtaggggtttgagatgctgtactgcaggaacacaaaacatgccatagtgccagggtctctcttgccttcatatttgtataatccctcttctcaagcttaggaacagtgcctgtagcgagcagactctattctcactgagtttgactctggagacttgccaaataagttataatagcagtaggactttgtccactgaatgattgggagaaggggaggaatcttattgttttaaaacaaaatcagtgatgataagagtgcttcataaatatttactcatatgctatttacttcataactcttgtaggaagttggtaactgttcattttacagaggaaatagagaaatcaacagtgaaatacatttgcctgtggtttcttattgcccctcagaagtagcaaactctaatcagttgtagttgcacctgcactgataccaatctacaagagcatggtttgtcttgaggaggaatttagtatctctagaaatctttgaaatttgttataataagaagtcttatctgaagccaaggtgacaagaagaaaaaaagaagtcttaaatggggtactgttgatattctccaaaagtgcttcaagatttatttatttaattattattattattattattttgggagacagagtgtggctctgtcgcccaggctggagtgcaatggtgcaatctcagctcactgcaacctttgccttccgggttcaagcgatttttgtgcctcagccttccaagtagctgggattacaggcacctgccaccacacttatttttgtaatttttggtagagacagggtttcactgtgttggccaggctgttctttaattctgcccaccttggcctcccaaagtgctgggattataggtgtgagctactgtgcctggccgatttatttttattaaggagaaaacagtataattaaaagcctccataaaatagttaattaaggactttatttttagtatttcaagacattaaatataaatagctacaacctcagatagctttataaaagtgtaattctttttttgtgtggtcttattgttaagctgtctttagactttgtgagttgggaagaatatgaaatttgatagttggaagatattggaatattcacagctaccatttagttgaggtcagagaaaagaatggttacttcatagtatggaaaatttttattatttcccctttttcaaagatttagtgtttagttataaaaacaagttaaagtggatggaaaatatttattccaaaagtagtttaaaaatgttatcaaacatacagaagatactttaatagaacagaacttttaattcattaaatgaaaggtaataatgctaatattgaaagggttaagattagttcattttgtatttttatttacttagaagtagattgggctgttgttttgttaaagagcatctgtaggtatttgagtgagtacctactaatgctctgttttttgttctgtgtagaatggtttgtttaaggtagtggaaaataaagatacattgtggtatatttgaaagaggagcagtttggagattcgaagtcttgctttagtgttggctttattatttactagatatgtgatcctagggcagaatattttaacctctctgagtctgtttatcttatgtctaagatgaggacaataaaaatactgcctgagggtgttgtgataatgagcagattaaaagtttttatggaaattctaaaatgtggaggtttgtggtctgtacagatattagttattaggtggcatagcaagtcttgaaagggattccaagcttttcatatacatatggagagagggaatcttcatataaaacttaaacatttctgatggtcagttattgaagattaaatcaggtgactgagaggaacactagcctatggaactccttataatttttaatatgtaatttacatattattttacatataaatatatatttcatcagaatgaaatatatataatatttgtatataattcatcagaatgtcagaattctgatgaatcatcagaatctcttataaattcatcagaatctcagaattgtttggatgagtctttttggttaaatgggggaaattgaagcactaaagtaaaataaatcctcagacatagtctttgtgaggattctgttaattgtattccaaaccatagagcccccatattagtgcccttcagtcctttattctcagctcagtttttaaaatgcttgttgaggatctgctgtagtgacaaagttaaccccaggcttaagtatgaatgtgtgacagctgaatagttcctaggaatagtctgcttctactttgtactgataagcagtaatctcaacaaaattttagtgacactaaagagttaacgttttaaagagttaaaaagttcagatacacttttatactcctgagtgaggaggagacgatacaaagaggaggttatgaaacgctagagaaactcttgtctgctgtaagcttatgcttgaaggaagaaagtctgacttagtcatatccatgaatgacaggacttggatctgtctgctgatgacgctgctgtttcctggttcttcgtgattaggactttgtgatgaagatgctcctgcagcatccagtattgtccctttccatttagagtgtctgtctgggtatataaaatagctgtcttaccttatattgggaaatattgggattttacatgacttcctaagtatcttatgcgattgtattgtttacaagtttttacattattttgaagaagggaattgacaaatccaaagtaaggagactactgggttcctttggaacccagtgccggtagagccattgaggtagctttgatggaggtcagtgtacttgtggccttcataggagctatttgctgattgttcttcagaataagacattaactgggtttgggagaaaagggtcatggaacgatttgacagttgcgtgactggactcaagaaaattttggggcttctgtctcagcttctctctttgtaataattcctaatgctttcttgaagatctatcttaaattgcaacgatgagaatagctggtaggtgaaacagcaaaactaaagaccttggaaacggatagtgagggttcttgaatataacttctaagaatcttggggccaagtgaggtagcttatttttctctgtagctaattgcttgctgtgtaatctgttgctttgctactggacattgcagtagtctccttacttggtcttcttgctgccagttgctctctttttccaatctgtcttagtctgcttgggctgccataacaaaataccatagatttggtggcttacacgacagaaatttattttctcacagttttggaggctaaaagcctgagatcagggtgccagcatggtcaccttctggtgagggctctctttctggcttgcagagggataccttctcactgtgccctcagtgtatgtgtgtgtatggtgggagggtctcatatgtgccctttggtgtctctctttttttaaaaaaattttttgtttccgtaggtttttggggaacaggtggtatttggtgacatgagtaagttctttagttgtgatttgtgagattttggtgcacccatcacccaagcagtatacactgaacacaatatgtagtcttttatccctcaccgccctcccacccttttccctgagtccccaaagtccaaggtatcattcttatacctttgtatctcatagtttagctcctgcttatgagtgagaacatacgttgtttggttttccattcctgagttaacttctcttaggacaatagtctccagttccatccaggttgctgtgaatgccattaatttgttccttcttatggctgcacagtattctatcatgtatatatatacagattctatcatgtatatatatacagtttctttatccactagttgatagatgagcatttgagctggttccatatttttgcaattgtgaattgctataaacgtgtgtgcaagtatttttttcatataatgacttcttttcctatgggtagatacccaataatgggattgctggatcaaatggtagttctacttttagttctttaaggaatcaccacactgttttctgtagtggttgtactagtttacattcccacaagcaatgtagaagtgttccatttttaccgcatctattatctttttatttttttattatggccattcttgtgagagtaaggtggtattgcattgtggtttggatttgcatttccctgatcattagcgatgttgagcattttttcatatgtttgttggccatttgtatatcttcttttgagaattgtctattcatgtccttagcctactttttgatggggttgtttgttttttcttgctaatttgtttgagttccttgtagattctggatattagtcctttgtcagatgtatagattgagatgattttcttgcactctgtgtgttgtctgtttactctgctaactgttcttttgctgtgcagaagctcttcagtttaattaagagctacctctttatctttgtttttgtcacattgcttttgggttcttggtcatgaagtctttgcctaagccaatgtctagatgggtttttctgatgttatcttctggaatttttaaagtttcaggtcttagatttaagtttttgatccatcttgagttgatttttgtataaggtatgagatgaggatccaatttcgttctcttacatgtggttttccaattatcccagcaccatttgttgaatagggtgtcctttccccactttagtttttgtttgctttgttgaagatcggctttaagtatttgggtttatttctgggttctgtattctgttccattggtctgtgtgcttatttttatactagtaccatgctgttttggtgactatggccttacagtctagtttgaagtcaggtaatgtgatgccagatttgatctttttgctcagtcttgttttggctgtgatggctcttctggttccatatgaattttaggatttttttttccagttctgtgaagaatgatcatggtattttgatgggaattgcattgaatttgtggattgcttttggcagtatggtcattttcacaatattgattctgccatgattcatctgtgagcatgggttgtgttcccgtttgtgtcatctgtgatttatttcagcactgtttggtagttttccttgtagacgtcctttacctccttggttaggtatattcctaagtattaaatttttttggctgctgttttaaaacaggttgagttcttgatttgattatcagtttggtcgctgttggtgtatagtagagctactgatttgtatacgttaatttgtatacgttaattttgctgaattcatgtatgagttctaggaactttttttttttttgagacggagtcattctgtctcctcggttggagtgtagtggcgtgatcttggctcactgcaaccttctaggagctttttggaggagtcttcagggttttctaagtgtacgatcatatcatcagcaaacagcaacagtttgacttctttactgatttgggtgccctttttctttctttctcttgtcgggttctctggctaggactatattgaatagaagtggtgagagtgggcatccttgtcttgttccaattctcggagggaatgctttcaacttttccctgttcagtattatgttggctgtgggtttgtcataggtggcttttattacattgaggtatgtctcttatatgccagttttgctgaggattttaatcataaaagaatgctgtattttgtcagatgctttttcccacatctgcatctatcaagatgatagatgacttttgtttttaggtctgtttgtgtggtgtatcacatttattgacttgcatatgttaaaccatccctgtatccctggtatgaaactcgcttgatcatgatggattatctttttgatatactgtttgattcggttagctagtattttgttacagatttttgcatctatgttcatcagtggtattggtctgtagtttgctttttttttctttttttttttcgtttcttttctttttttttttttttgagacagatagctagtattttgttacggattttttgcatctatgttcatcagtggtattggtctgtagtttgcttttttttcttctttttttttgtttcttttctttttcttctctttttttcttttttcttgctctgttgccaggctgcagtgcagtggcgcgaccttggcttactgcaacctctgactccctggttcaagtgattgtcttgcctcagcctcccaagtagctgggatcacaggcacgtgccaccatgcccagctaatttttgtatttttcatagagacggggtttcaccatgttggccaggatggtcttgatctcctgaccttgtgatccccctgcctcagcctcccaaagtgttgggattacaggcgtgagccaccgtgtctggcctgtagtttgctttttctgttgtgtcctttcctggttttggtattacagtgatactggcatcatagaatgatttagggaggattccctctttctctgtcttatggaatagtgtgaataggattggtactaattcttctttgaacgtctgttagaattctgctgtgaatctgtctggtccgagactttttttttttttttttagtggtaatttttttattaccatttcagtgtcgctgcttgtttctttgattagggccccccttcatgacatcatctagcctaaactaactttcaaaggccctatctccattggggatccatcacattcagggttaaagcttccacatatgaattttgagaggatgcaaacattcagtccataacacagtccatttcatacacttaaaacctcttcttctgtgatttgtctcaggacctactttgttccctgctgggtatcaaaacaattaaaagtgtcaccttagcatttatgttctttaataatctgatggagacttaccttagccagtcttatattcactgcttttcaatctgaattgtgtggttctgtgacactggtctctcctcacctgacctcctacttccagttattcttcactctcaacctgcaatactgtttgccattcttgtgcggtttgaattttctttcatttacgaaatcttccccagccttttcaggtgataattttgtaaaaatgtattccattaaataaaactgtctttgtatttgtatacattgtatacaaatgtatacattacaaatgtagcattcacttattttaaggactcttgggtggaggacagtactaattcttttttttaaccactgaagacagagctaaggtcagtatggcagctatgcctagtagattttgagtgcaactaattattgtataatagctggtcagcctcctgagttttaaccctataattaaaaaaaaagtctgatgcctgcttttgatgaatattgaacaaagtatttctgttgggaaattctgaggttttacttaccctaacattttttagaatactgtcatttggatttttttgttgtttactatatgtatattagacagattataaactctgtggaagcaaagatagtgctttacacttgtgtttctgcacagtaccatgctttgaggttaataaacacttggtaactggctatttgatttagggttggagatgtgtgataggttggtggaaagatttcacattccccaaattgcattttctttcctagcacaagctgcatggtgaggctttaaggaagcaccgaaacttacgttgattagctgagtggagacgtgaggtgttcatttttgagaatgttcccttgtgttcttacttactctgctcaaggatgagcaagaagtggccaagtagtaaagccatggaggttgtatgtgaaaacagctggttctgtagaaccacagtcagctctagctctgaaaagcaaaaagaagtgatactttaatagcgtgttttttttttttttgacagggtatatagcacttttggtctttagtaatgtgagactgaggggaaaatggcttgtgtgattctgggattcattggctagaggagctctgttttatgaggactctaggaagccagtagctggccaacactttggaaacaatattttttctaaaacgaccttgatttttagtccagttgggccagggaggagaggttatataatctagtattatagtcaatgtgaggaagcagtcataaaagcagaagaagatagtcttatttaatggaattatgagttcattttcctggtcaatttgtggtagaggtgaaccttttatttaatactctaaatcgtctttggttttagaatttggggccaaagctgcttttgttgattgtaggaaatatgttgtcttcatattttgaagttagactgcacatctagacatgatgtctttagcaattgtttcttcttcttctttcttcttcctcttcttcttcttctcctcctcctcctcctccttcttcttcttctcctcctcctccttcttcttctccttcttctccttcttcttccttttcctcttcctcttcttcttcttctccttctcctcctcctcctccttctcctccttcttctccctctcctccttctccctctccttctccttctccctctcctccctatccttctccctctccttctccctctccctctcccctttcccctcctccccccttcctatccccttctctccccccccttctcctccttctccttctccttctccttcttctgagatgaggtctaactctgttgcccaggctggggtacagtggtatgatcatagcctactgcatccttgaacttctgaactcaagggatttgcctgcctcggcctcctgaggataacaggtgtgcgtgaccatgcccagctgctcttttttttttttttttctttttgggtagagacagtatctcactatgttgaccaggctggtctcaaactcctgacctcaagcagtcttctcacctcagcctcccaaaatgctgggattacatatgtgagccaccgtgccaggcctttaaattattttttattattttaggccaggtgtggtggctcacatataatcccagcactttgggaggctgaggtgggtgtatcacttgagcccaggagtttgaaaccagcctgggtaacatggcgaaaccctgcctctacaaaaaaatacaaaaattagccaggtgtggtggcatgtacttgtagtcccagctattcaggaggctgaggtgggaggatcacctgaggccaggaaaatcgaggctgcagcaagccaagatcgtgccactgcactccaacctggatgatagtgtgggaccctgtctcaaaaaaattttttttttttttttgagatggagttttgctgttgttgcccaggctggagtacagtggtgtgatcttggctcactgcaacctctggctcccaggttctagcaattctcctgcctcagcttcctgagtagctgggattacaggcatgcaccaccacacccagctaattttttgtatttttcagtagagacagggtttcattatgttggccaggctggtctttaactcctgacctcaggtgatccgccttcctcggcctcccaaagtgctgggattacaggcgtgagtcacgtgcctggtcttcttcttcttcttttttttttttttattaggaattgagttgactgctctgatatggagagacctgttagtcttgtatatagtgcccagccggaaaaagcatctcttgaaggttagggcattttgtgaggagagctctagggctatatcagtctggaggtatgatctctgataaagatcataattctcatctcagtaatcttctttagaacaaaacattcttcattgtaagcttctcattaactgaaggccacctgatctgagattttggctcttagaatactcttttctgtgtctcaatcctcatatggtttacctctgaaatatagaatatattttcttgtgtagcctggtagagttggttttgttttgtttttcaaacagtaacttttattgattgtaaaacttccagatttctgagatgccgccttaccagtcttaaggttgatttttggtactctgaaagtgcccatttgctctgtgtgaaaagagcaggtttgcatttattcagtgattctaagatgagataattggtatttttatgatttgaatggaggctttgtatttttgaattttgtgaaacaaagctatgtttgtaaacacatttcaaaaaatataaatgccactttttggtgaagatactgaatagcaagaaagttcagaaaaaggagcttttgttaacatttaataataatctgactgttttcattgactatctcattgatgtttaaagagtacctgatgtttagaactttttgtattaaaaataatcctcaggctgggttgtgttaggaaaatattttctggtatcaaatgcttctttgccagtttggagtttttcagctattgtcttggtttagaagagggtattataaacaatatatttcaatgtaaagatagttcttgggaaactgtaggaaagcatttgcttagtgcctgatgtaagatgaacaagttgctttagtatcgtatgtgtaacatagaactattttgatatggctcaactggtttaggtgtaaatagtataaaagcattgaggcaaaatctaaagtaagtcttcagttttttaaaattaaagtggttttaattttatattcctttccatttctttctttaaagactttattggctttttaatgaaattgtcagttcagatatgaacgtattatttgcagaggaagtgctttatatctatttgcagtggctttcaccaaccttctaggtgacatgggaagaaagtgtcaaatttaaaaaatttgaaagcctgtatcatgtgactgaaaatgttttaactacttctgaaaaattgcaagaacataagcctaagctaaaaaatttaaacagtatggaaggatatttggtgagaaacacagtcattccttcctataccttattcccactccttggcagaggttttcctctgttcagtttctcctgagagcttttcgtctatatgtaaatgatgcatagcctcttattttttacacaatagggaacaaatagttctgcaacttcaccttttcatttaacaagaggataataggggatcactatgtgaaggacattattgagcccatactgattttagtaggatctgtgattttctaaaatatgtgtaatgatttgacctaattatacatgattctacatgcatatgacttaagctaaaaaaaagaagagcattagcatttcttgacaatcataagatttcagttttaccaacttatataattattctccttgtttagaaaacagacaagtcctactgtaataaaaagccttcaataaaatgttagttccttatgtataggcccttgtacagggcacacttttatatgaattatttaacatactcttcataataactctttgaagctgattcagttttactctcattcttgcagaaaaggaaacaggcttcaggaggttgagtaacaaagctagtaagtagcagaattaggtttcaaagctgatccatgaaataatgcagcaatagctagttcaaattgtttaaaagcgagtctcatggacagtggtttaatatcctgttaccaaatatctcacttatttaatataaaaatttggtgaagtcattattacaatgtatttgatggtgggattggttctagaaagggaactgattcttgcttaatccatacccaacattgtattagtgtcacctggggagcttttaaaaaattattcctggatccccaaccccaggcattccagcggcatgaagctggtgttgaacctaggaatcgtaatttttaacaagctacctacttaatttttaggcagccagtctggctgcagtttagaaccattgaagtgtgtgtcttttatttcaaatttatgaatatgaggtcttcattttccacttgttttctttctgaagataatgaaccattacctaatggaaacaaacatgaaaaacttgaaattttatttaatgtgttcaaaacagaagttttcatttgttgagctatgtattatattgtgttaaatggattttattatttccatagggccatattataacagacagtgaattaaactgaaaactttatcttgtctcttgcagaagcaaatactgtgaaaatactttgtaaaaccactttgtaaaatgtataggttggaacagaattaagtgattgagactctgaaggctctggaaatgggttgtcagttttattttcagccgagagcaagataatacttatctaaataaataattgtgggttagatatgttgtcttgtaattgctttaaacgttgagcctagattaccaagctgctaagacaagggaattaaaaaataagtcacttagtggcctttattttgtatatacatattttttgcattttgataaacctgtataaaattagtaaaaaattactttcccttctttaagagttctacttgccaggagccagagtagaaagattggctggcagtattcctggcattgtaatttttagtgcactagatattttcgtagaatattgattgttctgtgaaccttcttaccatggggacagtgaagtcagcaagtcacactacattaaacaaacactgagtaacattaactgcaaaatagtatgagaaatagagaaatatgatacagactgtgtaaaaaatggtaagtataagtgtttggaggaaggggttaattcttccatttgatatattaagagattctatttccatataaattgtaattaccttgtcgatttctattaagcctgctgggatttggggaatattgatatcttaacaatactgagtcttgcaatacatgaacatatctcttatctatttaggtcttctgtaaattttccttggtaatattttgcactttcaatttataggtcttacactcattttgttaaatttatccctaagagtttttacgttctttggttctattatatgtggcattaaaacttttccaattgtttgttgctggtatataaaaatagtgattgatttttatattgacttattggtatgaaattattcacaatattccattattgttttattgtgtttaagatatgtagtcatgtttcttcttttctgcctgatactggaaattgtgtctttttgcttttttcttaatccgtcttaagagagagtttatattaatccatgtattttcaatttccagtgttcttcatttctttgtgtatattcaggtattcatcttgtctcattttccttctgcccgaagaattttctttacattttttatagtgcaggactgcaggtaataaattctctttatttttgcttatctgagaggttttaattttgcctttgcttttgaaggatatttttgctagatatagaattctagattgacctttttttttccttttgatgatgaaatagtgtctttccattgtattttggctttcattatttttcaagtctgcaataatgatctttattcttttctatataatatttttcctatagtagcttttagattttctagttttcactaatttgattgtgaggtttgccatggtttgaatgtcccttccaaagctcacattgaaatttaattgccattgtaatggtgttaataggtattaataggtatattgttaagaagtgattaggctgtgagggcttcatcctcatgaattgattaaagtcataatctcaggagtgcatttgttacctcaagaatgagttataaaagtgggtttggccctctctgtctctttcttgcatggtggttctcttttccctctgccttttgccgtagtatgatatagctacagcatgaaggccctcaccagatgctagcaccttaatgttggacttccaccctttgggactgtgataagacatttcttttctttataaatttctcagtctcacgtactctgttgtagcagcataaaacagactaaggcaaggtttctctgtgtatgggtgtttgagatgtatgtttatagttgttcatcaaatttgaaaacatttcggctgctctatctttaaatattttttggtccactctcttacctttccttctaggacttcaattacacatatattagcactcttgatactgttccacgggttctcttaattttttaaaatattttccttctctttacaagtcagttttaatagtttctcttactgtgtcttcaggctaccgatcttttcttctgcagtgtctaacctgtttattccatccaataaacttttcatttcacagagtgtatttttttatttctagaaactcttttgtttttagattgtcttgcatttctttcctcaagatattcctgtttttcttttaagtcattgagcaatttataatagttgttttcaagtttttgctggtatcacctttttattctgggcctatttctactgacagatttttcttctggttatgggtcacatttttctgctgctgcacatgccttgtagattttgatttagttctagacatagtgagtgttacattattgagtgtttggattttgtcattttttgttttttagagatgtaaggctttttttctggcaggaaattaagttattagggatcaactcagacactccaagagttgtttttaagcttttgtgagtgagtctaaagtacctttttttttttttttttttgagacagagtcttgctctgttgcccatgctggagtgtaccatgatctcagctcactgcaacctctctctcctgagttcaagctattctcctgcttcagcctcccaagttgctaggattacaggcgtatgccaccacatccagctaatttttgtacttttagtagagacagggtttcaccatgttggctaggctggtcttgaactcctgacctcaagtgatctgccttcctcggcttcgcaaattgctaggattacaggcatgcaccactgtgtcctgccttagagaaacttttttgctaagaatagtttagctctattgctaagcattctgaggtctttactgaatgctttgggcattcaacgtttaggctgtattcagactgcttccagctgaaaacatctcccaatcctgtttgagctctgggaattgttgaatttacaactctggttgtttttcgcctgccattgtggagttttactgtgtgtgtgtgtgatttgctcttagtaatatagcgggactccaaggtgactccatgcacgtttctggagatccttctctgcgtagcttcctcctctagacctctgctgtgcaaattccagctgccttttcctcccagaactctaatttctgtcccctccattcagtatgactgctctgctcaaaaatcccttttcttctgcacagtaatctacaaattgtttccagataggaaatcaggatgatggtagagttcacctagtttcttttttctcagggatcacagtcttgtattatttgttttccagtgttgggaagcagtcttttgatgtgtgttttctaattttttaattgtttgcagtagaaggtttatctagtcccaattactgcatcatggctcaaatcagaaattctctttccttttaggaaggtaaatatggttaacagaaaatgtgtagtggaagagtagaggcagggtgcttgaaggagggcagtattaatgaagccatgacagccacatatatctggtcaggtattacaatgcaatgtaagtgatgcccctgggggtcactgtatttgggtgcacagcctaaatggtggccttgcatggagcagagctgggtgagaatacaagtgagagcctgcagatgtaattgacaggaacttatcttaatttagttggctctaaggcagagtatatcatctgagatgatgtcagggtttttattttgtgtgacttatttatcacttttgtaagggttattaataagcttcatttataaggattttgtgaagtttaaatgagatgatgcgtacaaaaatacctttttttttttattttttgagatgggatctcactctgttgcccaggctggaatgcagtggcgtgatcatggctcactgcagccttgacctcctgggctgaattgatcctcccacctcagcctcctgagtagctagcacctgaaaatgctttttaaatgatggtgcagtgtacaatgtgaagtattatttattgctaaagtccatgctttgagtctttacagaaaagcctgcataaggttgctctgatgtcataatgatcggaaaaaatgatctaaaatcaccgtaacttcagaacatcagagttcatatttagggaaaagttttcttttctttctttgaagaatttagtatgtaaaggttacttagcctcagggaaatctttgtataaaacagtcctttaaaaacaataccttgactgtagaagagaatgtttaaactggagtgaataccagtgaagtaacaaataccagtaaagtttcgagtgagttgaagaaaacaaaccagtgatctcaatggcgcaatcacctcagaatgaagctggggcctgaagtttataatggaataagcttagaggttacagccagaagtacagaggtaccaaaagtttttagacctctgtaggaacatcaaaatgtattgcaagcattacttgcctattcaccttccgacatcttccactttcactcatcttgctgtatcactagagggaagaaaatgcttactgttttccctggtaaggacactaaaagtcacactctttccccagagaaattatagcctagaagaaatagacaaggccacatatcagattacctttaagttaactgagtttctggcatgatttctcttgattccaggcagatttttttgggtgactatgcatgagggaaaatatccaatttcatgacttccaagaaaggtcactttcatagacctctgaaaaggcaaaacagttgttaactataaaaaatacattgaaattttggattttgtcttgattacattaaattgttttaaatgtttatgtttttaggtgttctgagctatttattgcattgacttgttgcattactctgtacgctaattaagcacaatttgtatatttctgcatttgctggtatttttaggaatatgtcttaatgtgcagttttatcccagtaattaaaaaaagttaccaaaagcatgacagtccactgaatgtaaactcctttttaaaaaaactttgttttatttaatatttattctgagcacacagagcattgttacacacattcagtaattttattatatgaaaattatagatgtaaaactcagtctgcaaaaaggaaaaaggcttgaaactcagttatgtatgaattaaaagcatttcctttaggcaaggatgatttagtagttttcttatatacatgtagttaattgtcatggtgtttcttggaagagaaaaacagtgtaagaagaccggcttttgaaaaacttgtttaaaagagttgagctgtaagctttatttaaccaacatttacttaacatatacttaacatataatttgtgccaggctctgtgcttggtttcagggatggaagggtgacatagatatggcccttctggaagagctaatttgttggggaaggcagtcatgtgaacagataaatactaatacaacctggaaagttctttaatagaaatggttaaagtgtcatggggttatagaggttaaagcagctacttgtgtctagagaattggtgcatgttttgctagtgtgctagacaaaggcatgtttagtggggaagacaggaaaagggaaaggctctagatttactttacagtaggcctgtgctagtaagtacagtagccattagcaatatgtggttaaatttttagcaactatttagcataagtagcacatatttagtgtaaactttaaatgggaaaccatcaccacaatcaaggtgattgaatgtatacatcattctcaagagcttctcctgtgcatttgttaattcctcctctctgtcctccttcacactcccatccctactcccacataactactgatctggtttttgtcgtggtaggttagtttgcattttctatactgtgtttttttgtttgtttgttaattttgagatggagtctcactgtgtcacccaggctggagtgcagtggcatgatatcggttcacagcaacctctgcctaccgggttcaagcgattatcctgccttagcctcctgagtagctgggattgcaggtgcacgccaccatgcccagttaatttttgcatttttagtagagacgaggtttcaccatgttggccaggctggtcttgaactcctggcctcaggtgatctgcctgccttggcctcccaaagtgctgggattacaggcgtgagccactgcgcctgggtgcatttcgtgtagttttaaataaataaatcacacagaatgctctgttttgtctggcttaaatcggcataattattttgagattcatttatgtaccaatagtttattcttatttcttaattgtaattcatatatcacaatttgtttatttcctctcctgttaatggacatttgggttgtctccaattttgggatattacaaataaagctattatgaccatgctttttttttttttttttttttttttttaaggtagagttttgctcttattgcccagattggagtgcaatggcgtgatctcggcttaccacaacctcttcctcccaggttcaagcgattctcgtgcctcagcctcccgagtagctgggattataggcatgtaccaccacacctggctaattttgtgtttttagtagagatggggtttctctatgttggtcaggctggtcttgaactcccgaccttaggtgatccgcccaccttggcctcccaaagtgctgggattacagatacgagccactgcgcccggccattatgaccattcttaatgcaagtctttatgtggacattcatatggtagatatatcttcaactcactaagaaactgccaaagcggttgtatcattttacattcccacttatagtgtatgagaatttcagttcctctatatactttctaatggtttgtatggttattcattttaattttagccattagaataggtctgcagtgctgtctcactgtggttttcatttgtgtttttctaattactaatgatgttgagtatcttttcatatacttacttgctatcttttatcttgtttgctgaaatatcttcatatctgttgtcaattttaaaaattaggttgtttgttttttattattgagttttgagatttctttatgtattctgggtacaagtcctttacgagatacatggtttacagatattttctactaggtggattgtcttttcattctctaaacagtgtcttttgaggagcagaagtttctaattttggtgaagttcagtttatcaggttattcttttatggattgtgcttttggtgttgtatctaagaaatctttccttaactggtcacaaatgttttttcttatgtctacttgtagaacgtttttttgagaccaggttttgctctgttgctcaggctggagtgcaatggcatgatcatgtctcactgcagcctcgaccatccaggctcaagcaatcctcccacctcagcttcctgagtagctgggactacaggaatgagcctggctaatttttattttcttatttattgtagagatggggtcttgccatgttgcccagactggtcttgaactcctgggctcagaggattctcccaccatgggcttccaaagtgctgggattacgggtgccagccactgcacacggccttacttttagaacttttaagattttctttcacatgtaggtctgtgatccattttgagttaattttgtaatatggtgtgacgtatggattgaagtttttttgtgtgtgtgtgtatgatgagccactgttccaacaccatttgttgaatagattccataaattactctttctcaagtgaattcctttgcatgtttgtgaacaaaaatagtttattgtttataaaaaaggcttttttgtgtatatacacacacacacacacacacaaatacatgtgtatgtttttctgtattctataatttagtccattgatctcttgtttttatgtaatatcatactttcttgattcttgaagctttgtaatcttgaaatcagtttgtatagtcttccagatttgtttttttttttttcaaagttattttggctattctaggtcctctgcattttcatataaatgtcagtactgttgtgtcagtttctaccaaaagtctccagaatttttattgtaattccataaaatttatagatcaatttggggagaattgacatcgtaatagggttttctgatccatgtagatgctgtagcattccatttatttaggttgtttttagcctttctcagcagtgttttgtagttttcactgtataggtctcaacatatattgtcagatatatctctgtttcatacttgatactgttatatatggcattgttttaaaaattcaatttctgattaatttttagaatatagaaatacaattttatatagcgacattgtatactgtgcagactaaactcactaattctggtactttctgtagattccattccatgggataatcttcataaatggtcatgtagtctgtgaataaagataattttacttcttgctttccaatctggatgccttttttaaattgcctgattgtactttccagaaactccagtacaattttaaatagtggtgagaacagatatccttgtcttgttttagatcttagaaagcattagtcttttacctatgagtatgttagttgtaggcttttttttatagtaccttgtattaaattgagggagtttccttctattcctagcttctaagagattttcctagaatagatgttggattttgccaggtatcttttctctgtctattgagattgtcacataggttttctttgttaattcgttagtatggcttattacagtggttactttttgattgttaaactaagtttgcattcctcagataaaccccatgtggctatgaggcattattctttatatgtgttgttatattagatttgttaaattttatttagaatttttcatgtgtgtttatgaagaatattgctttgtagtttttttcaatgtttttgtctggttttgacatcagtgtaatgctggatatgtaaaataaatgcagaaatatttattttctagaatgtttgctttaacaaatttttctagaggagttttagttttctggaagagttttcttatagttggtatgtttctttttttctagaggagtttgattataattggtattattttccccttaaatctacaactgtttggtagaattcaccaatgaaaccaactaggtgtagagtttttcattggaggtttttaactgcaagtttagtttctggaatagttccagagccacgttctttagataatctgtttcttcttgattgagctttgataatttgtgtttctcaaagattgtttatatcatataagttgtcgaatatattagttatttataacattaacttattatcctttttagtatctgtaaaatctgtagtgatgttactgctcttattcctgaaatggattgtttcttcttttcttgatcactgtggctaaaagtttatcagtttttttttttgatgttctcaaagaaccagcttttgagttccttggcctttttttttttttttctctattttttcccccatttctttgacttctgctgtgactttattacttgcattctcttgcttagtttggatgtaatttagttgttttctggtttgaggtacattatgaggtcatcaatttgagacctttctttttttctaatataggcctttagtgctataaattttctcctaagttcagctttagtagcattacagcaattttgatatattggattgttattttcatttagtttaaaatatttttcatttcatttttctttaacttacgggttatttagaagtgtgttattcatgctccacatattttggggaaatattctttctagagatatttctcttactgatttctagtttaatttgattgtggttcacatctacaaggatctgatctttgacaaacctgacaaaaacaagaaatggggaaaggattccctgtttaataagtggtgctgggaaaactggctagccatatgtagaaaggtgaaactggatctcttccttaacaccttgtccaaaaattaattcaagatggattaaagacttaaatattagacctaaaaccataaaaatcctagaagaaagcctaggcaatactattcaggagataggcatgggcaaggacttcatgactaaaacaccaaaagcaatggcaacaaaagccaaagtagacaaatgggacctaattaaactaaagagcttctgcacggcaaaagaaactaccatcagagtgaacaggcagcctacaaaatgggagaagatttttgcaatctacctatctgacaaagggctaatatccagaatctacaaggaactcaaacaaatttacaagattaaaaacaaccccatcaaaaagttggcaaaggatgtgaacagacacttctcaaaataagatatctgtgcagctaacagacacatgaaaaaatgctcatcatcactagtcatcagagaactgagataccatctcacgccagttagaatggcaatcattaaaaagttaggaaacaacaggtgctggagaggatgtggagaaacaggaacgcttttacactgttggtgggaccgtaaactagttcaaccattgtggaagacagtgtggcgatccctcaaggatctagaactagaaataccgtatgacccagccatcccattactgggtatatacccaaaggattataagtcacactactataaagacacatgcacacgtatgtttattgtggcactattcacaatagcacatacttggaagcaatccagatgtccatcaatgatagactggattaagaaaatgtgggacatatacaccatggaatactatgcagccataaaaaatgatgagttcatgtcctttgtagggacatggatgaagctggaaaccatcattctcagcaaactgtcacaagaacagaaaaccaaacaccgcatgttctcactcataggtgggaattgaacggtgagaactctaggacacagggtagggaacatcacacacccagggcctgtcgtagggtggggggctgggggagggatagcattaggagaaatacctaatgtaaatgaccagttgatgggtgcagcaaaccaacatgacacatgtatacctatgtatcaaagctgcaggttgtgcacatgtaccctagaacctaaagtataataaaaataaataaataaaaataaaaaaaagcatttgtggttagagaacatgctttgtatgaattgagtgattttaaatgtattgagtcttgttttatggtttgaaatatggtttgccttggcaaatgttctgtatgaacttgaaaatgtgtgtgtcttctgcaaggttttgtggagtgttttctaagtatcaagtgattttagtttgtagtgttgttcaagtctttcatgttcttttttattttctgttttggagatctatcaattattgaaagagggaaattgtaatctgtaatgtgaattgtgaattttgtatttatccttgcagtttcatcagtttgtctttacatattttgaatctctgtctttaagtgcattaatgcttagtagtattatatgtactcttcatcaggtgactgttttatcattataaaatgacccctttttttctgataatggcttagaaatccacattgtgtgatgtttatatatacacttcaggtttcttttgatatgttagcactgtacactttttttcttgtttttacatttaactgcattctacctaaagaacagtttatttatttttaccagcatataattgggttctgcgttttttatctagtctaaagtctttgcttttaatttggaacatttaatgtaattattgatatgactgtgtttgaatccattatcttgccatttgtttctttttatctcgtgtgttctttggttcccttttcctccttttatgcctccttttatattaatagaatattttttattctgttttgtcatctttattgccttattagatataacttgttattttagtggtttaatgatttgcagtattcagtttcaatttttatcagtggacttcaggtgatattatgtcatttccatatagttaatggagttaccattccattgctcctcttatctttctgtagattcatatttctatctggaatcatttttcttgtacttcaacaactttaaccttttctgcagtagtgatctgctggtaatgaattcctttcagctttttcatgtctgaaaatgcctttattttgtcttaatttttaagaacatatttttcctgggtacagaattctagatggacaattttttctttcagtatattaaattttgcttgtcttgtttttgtaatatccagtgagaaatctaatgatagtcttatctttattcctctatataaagtgtcttttttcttactgcttttaagattttttttttaaattacagattttgagcaattttattatgtgacttgttacaatgttttcatgtttcttttgcttggtatttgctcaactttctggaactgtgaatgctatggtttcaatgttccattcaaaattcatgttgaaattttattaccattctgatgatgttgaaaggtgtgatgtttaagaggtcatgagggctctgtcttcgagaatggactaatgccattatcatgggagtaggtttgccccctcttgctctctgtctgttgtcctctttttgcctttctgtgttatgatgcttccatcatgttacaatgcaataagaaggccctcgccagattctggctccttgatcttggatatccaagcctctacaactgtgagccaatttcttgtcgttatgaattacccagtctttggtattgcattatagcagcacaaaacagactaaaacagttagtttatggttaccaaattttgaaaatttttggaagttttttattttttagataatttactgggcctcccccaccttcagaaactctaattatatatatatagaagaacacttgaagttttgccacagctcacttcatttaaaaaattctgttttctcttttgtgttttatattggattgtttcttttccatgccttcaaatttactagtttttcttccacaatgtttaattagccattaatcctgttcagtgtacttttcatctcatacattatggttttcacctttgcaagtttgatttgtgtctttttatatcttctatgtctctaaacattttgaacatatagagcacgtaataactaatttaacatccttgtctgttgattctaacatctctgtcagttctgcttagatttaattgattaattttgtccctctatatggtttatacttttttcttttttatctgccctgtaattttttattggattccagacattgtggattttatcttgctgagtgccgtatattttttatttctaggaacttttagagatttgttctggaatttagctaaattactttgaaactacttgatcttttctggtcttgcttttaaagatttgttaggtaagtctggagcagtgctcagtctagggttaattattctccactactgaggaaatgtgttttgtgtgctctttcagtgccccgggattcctgaaattttccagtctggatgttgagaataggcactattactggccttgtgtgaatgcttggcactggtaccttttatcttttagagttattcagtctctagcttcaggtagtttcctcaaatgcacgtgccagttagtactcaagttgaactttttgcaggagtttttacctgctctcaggttctctgccctgccgactctatgagatccgtagtcacgttctgatctcagtgagtctgtcagtctcccatcttctttccccttcctgcaccctggcctgcaaactttcttagcttagtaagtttgtgtgtttgtggagctcatctaatttgtttcttttcccttagagatgactgtcctttgttgcctgttgtccattgtctggaagatagttatttcatttattttctccattttatccttttttcacatgaagtgtaaatctatttctgttactctgtctttatggcaggcagaggttctaactatttacatttaaattagttaaaaaaatgcattcctcatttgatatagccacattccaaatgcttaaaagccgcatgtatctagtgactaccatactggagagtacaaatatagaactttacccgtcactgcagacagttctgttggattgtgcagcattggacaatatatacagtttgcctgtatatgagaaagagagagagagagagagtgtgtgtgtgtgtgtgtgtgtgaagtgcaataaggctgacaggcatcgtggctcatgcctgtaatcccaccactttgggaggcctgggatgcagagacaggaggatcacttgaggccaggggtttgagaccagcctgggtaatatagtgagaccctgtctctaccaaataaataaataagtaaaataaaataaattcagcttttaattttggggatgcctggtttatactacttatctagtggattgtgaaactggaaatgagtttcaacctcagtgccctttatatgtatattaggctgtcttctacagcagtgagaaatctctggcttattgggtcataccttattttgaatttttttgtttacttctggtggcaggtatcatttggatgataacattgttgtccctttttaagtcagactttgtctacattcttgaagtattcttaggtccaacacagtgtctggcacacagtaggtgctcaaatattaatacttgtttatttaaaaatatttaaacatttactatgagcctggcattctctttggtatatatggatgaaaaattgatttctgctacgaatataataacctgtgagtatccattgtttccatggagaggctacagctttctaacagtaggatatatctgcatctcaaaaacttaaactagattttcagtcactctgtcacctgaggtgtggaatggcaaagctgagcaaccttaaaatcttgagaaaaatagtgctctcccttccctagtagctgtcagctgtttcatgtggagagaacaaagtttctctttgatgacaactgttgaggtgctaggaatgttggttaaccacctaggttcatgaaaagctgaagcaataattcagtttttgtaggagaaacaccttacatacatattaaacctttttttctcaaagagtctaatccaatgtaaattgagaaattggggacagtttaatcaatattgaagtttcttgttttgactcggctttttaatctacttacagaggaacagtttttacattcggatatcaaatgcttattttgttaaaatggttctatttgttatttacaaataaaaataataaaattgtttagaaattggtcatgtattggtaatggtacaagcaaaacactccttatatattgaattagaagttcacaggcatctgtgtcaattgctttggtttacaaaaaaattagcaagattattgttccaattttttgacaacttgaaaaaaatcaaaagaaatagctgctgtaaacttaggttggtgcaaaagtaattgcagtttttgccttttttagttaaaaaaccgcagttacttttgcaccaacccaatactatgttttacagataaaatcactgtcttctgagttgtaagatttgaaaatgcattcgtcaaataagtaatttatttgtattctgacttagctcccaaataatttgaattggacatatttactcagtatagaaatcattaaattacagtttcctaatggtgagataaatttcttttttaggatagtgatttcattaataccttatggaatttggtttagtttgagtcatttttgcagtaaagttctatttttgtaagtaattttgaaagtcctacgaaatgtttgctgcaagttagtcatacagagaattgctttgatatttcaggtattttgatgttatgtccaaaagtgcttttgttgacccaaggctactgtattgtattttttttttttttttgagatggagtctcactctgtcacctaagttggagtgcagtggcataatctcggctcactggaacctctgcctccccggttcaagtgattctcccacctcagcctcctcagtagctaggagtacaggcatctgccaccatgcacggctaatttttgtatttttagtagagatggggtttcaccatgttggccaggctggtctcaaactcctgacctcaggtgatctgcctgcctcggctttccaaagtattgggattacaggtgtaaaccaccatgcccggcctactgtattgtactttatcccaattctttgatatataaaccctttccctctctttaatcatgattcttttaaaaattaatatttggattctcaaccttgaagaattagtttaaaaaattaatttattaggccgggcacagtggctcacacctgtaatcccagcactttgggaggctgaggtgggtggatcacctgaggtcaggagttcgagaccagcctggccaacctggtgaaaccctgtctctactacagatgcaaaaattagctgggtgtggtggcgggcacctgtaatccctgctacttgggaggctgaggcaggagaattgcttgaacctgggaggcagaggttgcagtaggccgagatcccacctgggcaacaagagtgaaactctgtctcaaaaaaaaaaaaaaaaaatcagttcattaaataagtacctacagtatgctagctagacactgtgctgattgctttgagcataacgaaggtgtattggatatggtcattatagctccatacatctgatagatgagagaaaacttgtatgctgtgctaataattgcaatagaaatatataccgttttggatttgtaaacatcttagaaaaaatacctagaaaaaaactcttaatgagcaaatggattaacatgtctgctttccatttttaagtatcaggtatccaaccatattattaaaataaaaaccaccagagtacagtctccatagttagatttgtataagcaaccgcaaaacgatatagtccagtatctagcacagcatagtcaaacacatagtattatgcatatggtaaatgttaataaatgtttgtggaataactgcctatgaaaacttctttttgaggcttgtattagtaatgtaatttaccatagataactttcctcatgtttcaaactgctggtcattaccaattagtgggttgagaaaacactttagatctcatacagcatggtaaaaaagtagaatagaatggaagctatgagagtgtatcacatgtagttagaggattgttttttatgacattttagtttgttgtataaatgttgtatataaatgtatgttatgtgagtatatgcttgtgtacactaggtggtgatataaaatatgtttaatgggccgggcgcggtggctcacgcttgtaatcccagcactttgggaggccgaggtgggtggatcacgaggtcaggagatcgagaccacggtgaaaccccgtctctactaaaaattaaaaaaaaattagccgggcgtggtggcgggcgcctgtagtcccagctactcggagaggctgaggcaggagaatggcgtgaacccgggaggcggagcttgcagtgagccgagactgcgccactgtactccagcctgggtgacagagcgagactccgtctcaaaaaaaaaaaaaaaaaaaaaaatatgtttaatggtgaattgtggtcaaataacttggaaagccacagcttcagtagttaattttagctacttttaaagtgtgatttctctttactacttagtaaggtgtgaaaacgattgaatttgtgtaactgatgtttgatgggtttaattgttgtcagtgctgcttagcagagtgctctgtgttgcagtttaaacactactccggattttcctttattagataaaagtctactataacttttttttgttcttagtcgcctttagtctttagagttactgatcttcaattcatgttggacagcttcctttgaagagagaaaacagctttattggcagtggggacagtcaacattactatccatgttaaagaaaagatcccagaaacatgaagaaaaagactagaatgtaattatgtaaaaagcaaatcaacaaaaagcgaacccagaccaccacagttcaaataagagaaaatgcttccaattagtgatgtaacctacttaggcctcagttttctcattgaacagaaagaaaaggttgttactagatcatctcttaagttactttctgatacagaattgcaactcctgagacatctttatgtctctttaagctgtggaatcctaccagatatttagaatgataatgtgaacagctcgactttcaagaattcagttcggtgagaacacctaatgaagtggaaattagtgtgttatgtgtgcatttaatgactttattgtagcctgtgtctagactgttgatttgatgaagtttatacagaagaattaaatgctcatgatttatatatttaaaaaatctatgagttttcctggaagtgagtgtttctttgaagcagatttaatgtgttaaggtcttttttttttttttttttttttaccttctgtacaatcattttctgaaattgtaataaaaatcaagtacaaaagataatccagcatttaaatactctttattctagccttttctattatagtacttgtttttgtttttttattgtcgtggtattttgtgttaacttgaagactaattgagcatacagaaaattttttcaacttgggaatgtggggcaatataacttgaaaagagatgaaaaaacaatttctttgggtcagaagtattttacatctggaaacacacccttgaactctggctgtggtttttccacatgtgccatttattagcagatacgttctttatgaaattttgacagtatatgctgctttttgtctgaggaaagcttagttctaggcagaatttagctttgttgtttttgattcaggagttaaatctttagtcaagtgaaaatataaggatggggacattcttaactaaagtgccaggcttctatggtttttatctttgctttattttttaggaagagtgttttgagatatgtgaaaagagggagctctttgattaagtttgatttggactcagtgttttatttcattggctttcatactttagggcatctgctttgtaatatgaaaggaggttcctacccacaaccttctctcacccttttggatgcacctacttatttttaagtaatctttgttctttatgaactgtcaaatactatttgataccctgtgttataacgagtagaaattggtagttgtgctaggctatgccctgtgtctcaaggaggaattggggagattgggcagcgttcatgtatgtatcgtaacttggttcctgggagaacatgagattgctatggcaacaaaggttctttgaaggcaaaaattttggcagagtggttgggtcttttgaagtgctgggtgtgttgacaggaaaggaataagcatacatctgtagactagcagtcaaggaaaataagcatttagtattagctttaacttgaggtcaaatatattttgagctgtaacttgagcgcaaatatgttttgagttccacctcagtgctaattttccttcagaacttttatttgtatgaggttttctcttctcaagtctgctgtttcaagaacaagtttcgaagaatgtaccatgtagtgttttagctggcctaaaattgtctaaagttttggtaaaatcagtgtggtgtaatgcattctgatatgagttgcttctaattttaagagtagataaaaatcattacaaattactcagcttagaatttggtatcgcttaaaaactggtgacaaaaataaattcccagactctgtgatctgcctgctgttttcaagatccttatcttacctcaccaactttctctctctcttttccattctcaatctcaactttcactcctggttttgctctgtggctgttcatgcttgcttcccagccattgctcaagatgtatctcctgcctggcatgtcttttcatttttcagcctctctaaacactactcaagttttacttttgtcatgaagtttccctgacttttataaccaacagggatttcttccttctctaactcttgattaacatttatgtattaaatcatttggagcttaataagattttacacatttttgtttatgtgttgtgtgttgaacttattgccttagtaataagtttgtggtcagaatttttgtactcttgtgccttataataaaggaccaggcacatagttaatacctggtaacaactagttgattgatggttttaattttaaatggatcagtggtaaaaatcatattcaaataatagatcatttatttagctttttaataagttgtataagtagtcaccatagataatgtcctgtatcagggatactcttatttttaatgtttggtcccagagccagtgataattttgtatagatcttttcccaaccactattcatttaaactgaagaatccagaaaatgatttaggtgactgttttttcagttctctcaagaatgacacttaagtggtagtattctagatgcttaggagatgcctacagtggatgactaaaggcactagcacttaattcttatgtgaaacctttcttgagaatgggacatatagtatcatttctatgttatattcagtttcctcatatttggcttgactgaatctatgtattaattatattatgctcttctatttttttttcccaagaagtaaatattggtaaaaatggcaaggaaagtaattctagggacctggtagaagttttgctattttgatttattagaaaatattgaaacagtaacccagttttgagcaacactactgtatgcaaatgcaaaatacagttctcactttttagacccatttattacaaacttgggaagtttttggtactacaaaaactttttgagatttttctttccacaatctgaatgaagaggaaggtgaaactagctgctgaatcaaatatttttagaatttttttcatcctgtttggaaaagaatcattagttatttgcatgtatattatatctggaaatggtaataaatattcattgaagaaatagttaaaatacagaattaagttcaaaatcaccatttgctctttgcttttgtttactgagcaggtctagggaaatgtctagggcttagaggagtgccagggttttttgggtctgataaaactttagggatattccccatttgcaggatagttattctcttattgcaagtcgagtgaaaaaaactcttgcagttatccatgatgggaaatggtttgatggttaataattaacatacaattagtcactggctctgatagcataagttatatttatgtgaattttcttgaagaagtaatattttatattagtgatttttgattgaaatctttagaaaatgtattgcaattgtattttattttctaaaacttaccaaatatatagttttacagggatacagtcatgaatatttgttgtattttgcatcatgagaccatatagtgataatttatagtcttatgatgaaggttgaaaggaatgtttgattatatgctaatctttttacactagtgtgcatttatatgtagcattttgtttccttattaactatagttatttcttaatttgtgaatttttagttgccctattttttttggcttctatttaggttggtgcaaacctaagttttgctattactttcaatggcaaaaaagctaggttttgccattaatttcaatggcaaaaaagctaggttttgccattactttcaatggcagaaaaccaaggttttgccattactttcaatggcaaaaaccgcagttacttttgcaccaacctaatatcatgctgtgtaatctaacctgctaaaaatggaccccctaagattaataaggtagctaagccttgttaaaatcagagattgtgttgatatatgacaagagaccatgggaatggtttttgcttttcttgtggagaagaatgcatgagctttgttgaaactctttttctatcttatttctctgttagtctctgggtatagttgattgattgcagtcacttgatgtccgactaccagatacacggactgttgttatttttccttcaggtgactttgatactaaaaacactttcacttattttttttctcacatagcaaaatttgagaaaatataaaagtaaatggcttatatatattaaatgtgtttgaacctgaactgtagtgtcaataattataaattaaggtatcaagaacttattgaatagtagaagtatttttggaataaaaaagttggctgggcacggtggctcacgcctgtaatcccagcactttgggaggcctaggtgtgtggatcacttgaggtcgggagtttgagaccaacctggccaacatggtgaaaacctgtctctactaaaatacaaaaattagccaggcatggtggcaggtgcttgtaatctcagctactcgggaggctgagacatgagaatcgcttcaacctgggaggcagtggtttcagtgagtcgagatcgtgccactgcactccagcctgggcaacagagcgagactcggtccccccgtgcccttcccctcccccaccaaaaaaaaaatattaagttgacttggtttcataattattgatggtgattagaaatatttaaatgaactggattaaattataatataccttgctagtgaacattgttttgactacctgtgagcctgtcctggtgtgaagtaatttttctgtaaatacaaagaaaaaaaaaaacgctgaagttgggattttgattattgagaatagagactggattcgccaattgagaaatacttgtcaaggacattttttggtattggatggaacataattagcttactgatttgatggttctgtgtagttcctgaaactcttggctcttgtttgcctttctttaactctggctccttctccttcttctgtttgtgtatctgtttaattcattgagtgaggaggacaggcagaactgtgtctgccaaggaccggatgtacttctttccttgctcttggttttttgctcacttttatatgtaaggtattagtacaaacctaaaggagagaaagtagaggatcagatcattgggacttgttctggtttcaagaaaaaattaacaaattgccgaggatggaggggctggggttgtacagctcaactgcactaggatacaaattgaagatcaagtatcaaggcagatgctttctagccattggaacctttcttatctgggaagaacttaaacatagtaaccatagtagaatttccagaaaagtgtgaatgttgtttttttttaagcgagttaagtagaggaaattgtcttttagctagataaaaaatatcattttagcttctcattggttgctaattatgtttgtttgtttgtttgtttttttgaggcagagccttgctctgtggcccagggtggagtgcagtggtgcgatcttggcttccctgcaacctccgcctcccaggttcaaatgattcttgtgcttcagcctcctgagtagctgggattacaggcatgtgccacgacgcctggctaatttttgtatttttagtagagatgggattttgccatgtttgccaggctggtctcgaactcctgacctcaggtgatccacctgccttggcctcccaaagtgctgggattataagcgtgagccactgcgcgcagtcaagaatgtaattttgatttttgttttgtggcttgtgtttcataagaaaaagttgaaaaagctggctctcattattttcctttgcatccattcatattacctttttttgtttttttttttttgaaatgggggtctcactgtgttgcccaggctggagtgtagtcactgttcacaggtacagtaatagctactgcagccttgaactcctggactcaagcagtcctcctgtagctgaaactacaggtgcatgccactgtgcctggcctcatatcacttttatagcactaagctaagaggaataagattgcttttcagtcaatttgagaaacatggctatttggtttgtacaacatggctttggcttttattctgagtgaaatgacaagactaagagacagtgacatctgactttcattcgtgaaccccaaatatctgagacaggtctcaagtcaatttagaaagtgtattttgccaaggttaaggatgtgccagtgacacagcctcaggaggtcctgatgacatgtgctcaaggtggctggggacagcttgcttttatacattttagggagacatgagacatcagtcattatgtgtaagatgtacattggttcggtttggtttggtaaggcgggacaacttgaggtatgggcttccaggtcttaagtagatgagagacaaaaggttgcattcttttgagtccttggttagccttccactgaatagacactttagtctggctcagttaatctgcattcataaacaatagggcagaggaagcagttatatgtatttgtctcaggtgagcctcagagggatgactgtgttctgtttgtcctttgtcaacaaggaatttccttgtgggcaaattgtgagggagatatgtagctttttatgtttgtaactatcttatttaggaataaaatgggaggcaggtttgcctgacacagctcccagcctgacttttcccttggcttagtgattttggggtcctgagatctattttcgtttcataaacttcagtaggatcactctggctgctgtgtagagaatagggtagaaagaagagaccagttaggagactacagaagatgtgattaaaatttggatatatatcggaggtagaactgaggatcttgggcccgtgctacagaaagagaatagagctgttattaattgagaatgaagaaaactggaggaacaggttttggtttcttttttgagacatatgattgggaaaccacgtttagatacactatactattagacatccagttggagatttttttttttttttttttttgagacgagatttcattctgtcacccggactggagggcagtgatgtgatcttggctcactgcagcctccacctcctggcttcaagcaatcctcccacctcggcctctagaagtgttgagattacagatgtgaaccactgcacctcgcccatttggagatattagtggagaattggtctggtcttgatctctgggtagagatgtgagtgggagttatcaatttgggagtcatctgaatagataatgcaaatttaatctgtgggattggagtgagtgttgagagtataggatgaagacgagatcagaagactgtgtatgcagttcagcatttagaagttggggtgatgagcaaaagacacttgagaaggcatatccagacatataggcaacctaattaatggtggctgtgtgtgtggtttaactttccttttaagagttagatggaaggaatcttaagctacatttagtctgtctcattttgtgaattagatttttaaaaaaggtcatgtggacagactagtggaatagaactaaggtatagacctaagagcatattgaaacagtgtatggtaaacttggcatctcagagcactggggtaaaggtggactttttaataaatggttaaccatttggaaaaaagattacagctgggagtggtggctcatgcctgtaatcccagcactttgggaagctgaggtgggtggatcacgagttcaggagttcgaggtcagcctggccaatatagtgaaatcccatctctactaaaaatacaaaaattagctgggcatggtggcgcgcacctgtagtcccagctactcgggaggttgatgcaggagaattgcttgaatccgggaggtggaggttgcagtgagccgagaccacgccactgcactccagcctgggcaacagagcgagactccatctcaaaaaaaaaaaaaaaaaaaaacaagattactatctttggcccattaaatgaaacaatggaacagagatcccaatgtaaaagaatgaaactacaaatataggaagaatatatggatgaattcttctgcaacctgtgtaaggagagtttttctctatatctcaaatcccaatgtaaaaagaggaaagactgatacatttgactatgtaaaaattaaagataagacttttgcatggggaaaaaacagtaattacaaagtcaaaagacagatagaaaattggaagaaaacagctgggcgtggtggctcatgcctgtaatctcagcgctttgggaacctgaggcagaagaaatgcttgagcccaggaatttgagaccagcctgggcaacatagggagaccctgtctctacaaaaaataaaaaaaaaaattagctgggcatggcagtccacgcctattgtcccagctactcgagaggctgaggtgggaggattgcttgggcctgagaggttgaggctgtagtgtttgtgccactgcactccagtctgggcgacaagagttagaccctgtctcaaaacacaaacaaacaaaaaattgtaagaaaaacatttatcacagaaataagggctatccttcatgtataaagaatctttgaaaatagagggtgggctgggagccttggctcacgcctgtaatcccagcactttgggaggccgaggtgggtagatcacttgaagtcaggagttcaagaacagccaggccaacatcgcgcaactccatctccactaaaaacaaaaaaaaaaattagctgggcgtggtagtgggtgcctgtaatcccagctactagggaggctgagatagagaatcgcttgaacctaaggggtggaggttgcagtgagccgagatcacgccactggactacagcctgggtgacagcgagactttatctcaaaaaagaaaaaaaaagaaggcggaaaaagaaaacagcaagacacccaacagaaaaataggtcaaagttatggacagttcccaccatggcctgaactactgtttcaggtttactttagaatgccctgggctgagaggaggggtccatgcagttagttggggggcttagaattttatttttggtttgtgctagacaaagggataattcatattctgttggagtgggaaagtgtaagatttcaccatgctactcagacgctactaagaatggcacacaatttaaaacatatgaattgtttctggaattttccatttaatatttctggactctgagaagtcttcccttatctgtagtttcactttctggggattcagttacccttggttaaccaagatccaaacatttttatgaaatgtccaaactaggcaaatgtgtaaagacagaaagtagattagtggttacctagagttgggtagcgggagtagatggaagaagggggtatgaccactagggatatggggtttttggaggaaggggtaatgaaaatattataaaattgcttgtggtaatttgatggttgcacagctcttacgaatatactaaaaaccattgaattgtgtattttaaataggtgaattatagggtatatgaattttatctcaataaagctgttataaaagaagtgagttacctatgcttagtgatttatggctcaaaaggtttttctccatcactaaaatgtctgtgattcattcctgtacattgctaatgagaatgctaattagtacagcccttttggaaggaacttcggcagcatctaacagaactgcatatgcattttcttttgatccagcaattccacttctgggcattcaccctgaagatttgcttccagcaataaaataatatgtattatttgtaattgcaaaatacagttatatctaggagacaacctagttgtcagtacataggaaagtgattatataaactatggtatagccacaaaatgcagatgtgaaaaagaacaaggaaacttctatgaattgatagtgattttaggattgtgtgattaagtacagcaaacaaagtgtaaaagagcatctataccacacttccttaggtagtaaagaagccaagataagataatatacatctgtctgcaaatgagccatagaaaagataagccaggaaccacagacacagttagtaggtttagggtagaaataatgagggatgggaatctgatgaaaggaaatggaggaggttgtgacagtactgagtatacctttgtatatagttctaacttggaaccacgttaatgtttctcatacttaaaaaaatcacagagaagaatcaaaatagactaaagcagagacaaatgaactcatctgtatttcaaatgagtaacatagttatggaggggaggggaacagactaacacaacttttgaacacagtgtttggactatatagcttcaggactgaagacaaaagtaactttaaaaaatattgaactctagtttttaggctttccgttttcctggagagctatgggctagcaaaccaaaactatgttctgtggtataccaggattgagcaaataggtaaatattttatgggtaatagaagccaggtttttgttggaggagggagttttaaaagtagaaagggagaagactcgaaggaagagatcctgtaatcttccactagagttcatagtatcaatgtaaactcatttccctcccgcctccctccctcccatctgtcagtcgatcaacaatcaaaatagttatagatgagacaggtgtgtacatatatgaatgtgtatgtatgagtatgtatgcatgtgtatacattaatttatttccaagctgtatctggtaagaggtacatacaaagcattgacatctgagaaagtcaggagtgctcaaagaataatagggatgagcaaaagggcacaggatatttgtaggactcccactggccttatctgtgctactgtcagcatcaaaataaataataatagtgatggcttataacattaataaaataagaatctatgagtacatacagatgtaaatagatgaagagggcaatgttcctcttttgtagtcgaataacaactaatgtatataaaaggaacaatagatttagaaaatcaccatttggcaaccattatggtaataagtgattcatgcattggttagtaattgattaatggatgttaaaaactaccaaagtgaaagtttgatgagtaacaagatacttacatagatagattgaagatactgcctcacaagatactatttccagagagaaagttgtaactttacagtggagaaattttgctgacaggattgtaaccatgtgattaaagttttatcaccagtaaagggacaagttgacaagtgtctcctgatatagagcactgagaagacaccatcacttttgtgttattcctgccaaaaatctaaaacctgaatctaatcatgagaatgagacaggctcacgttaaaggtcattctacaagataactgagaagtactcttcaagtatgtcaatatcatgaaagacaaaaatttaggaattactcagattaaagatgccacaaataagtgcgttcagtgttcgtggcttttcttttcctgtgaaggacattattgggacaattggtaaaatctcaataaggcctgtatattaaatggtagtattgttttggtgttaagttttaagtttcctgattttgaaaattgtattttgattttaagaaaatattctttttaggaaacacactgaaatatatagagtaataaagtatcatgtctgaaacttcctctcagatggttcagaaaacatatgcaggtagacaggaaaacagagaggaaaaaatggttatagcaaatgtgattctttgaaaaagaacaggataaagtaattgtggtaaaatgttaccacatgtgggatttaggtgaagactctatggggattctttgtgctagtcttgcagcttttctgtactcttgcaaattatgtcaaaataaaattttaaaaataaaaagatactttacagaaggtttaatgaaactgcatatgtttttgagagaaggaagaataacaaaattattaaatatccactttgttagattctttgagagatactgtgcaaagtacttctgtgtactttagtatttacaacaatcctgctttaatatttacagcaatcctagaggttagatactagtttgtaagtttttatataggaggaaaataagaaacaaatgggttggaagactggtctgtagttgaaaaagtaatgaggcagagttaggattccagccctaaattgtttgacaactaatttcgtatttttttttctctaccaaccttttacttagatccgctttctaagtgatttttatgaaaaagttttatcattggttaaatttgtgtggtaaggcattaccaaaaaattcatttagaagctatctttgcttttgtagttaagccatttacagaatgtatttgtttaatacattttaaaaaatcattagccatgtggctcttgagtttcgaatagtggacctccttaaaatatatttggtttaattttataaatgttttcccatcattttctttaatgaaaacatttgcaatattcataaaatgttagtaagggacaatatatagcaaacatttttagcttatgtacaaagggcaacaacatgtttatagtatcttttgtgattagtagattaagttcattttgacattggaatttatgtactggcatttggcttatggccatgatctaataataagggtatggtaacaggtctttaaaatattagtaatcaaaatgcttttatctgtagctgacaaaatgtagtctaaagcaagaattaaagccatattagagtgattgaatttgctgttaaaccttgcatttaaaatagttaatgataaactttctatacaatggcattcctgtactttgagaaggaaaatatctgtgaatgatgggtcttttaatgattgttaataactagccacataatgattgaaatttcttttagcaatttcaaattattagaatctcattattctaaaaaaatgaatttacctaataaagcctgcctagctgtattatctgtgtgaatatgttaaaaaataaaatatgccagtagctaagcatatgctaaaaactaggggttttttttgtttgtttgttttttgtttgtttcctgctatttaatgtgaggcactgctaaacttttatatcagacaaccaacagatagccaattacaagtaataattttaataaaactttaggttttaaaagtcaaattttctttgtatctaaattgagcttcctacgtatttatcgctaaatataatcagatacttgggcaaatggctggttttatatctgaggcaagaaatgtacaagagaaacatggaacatcttgtcacactagataataggaagcttcaaacactactgggcttttgcagaaggactcagggtccaatttgaaaaactaatagcttggctaaaaatgggacaacttgagcaggaataaagatgatatttgcaatggattgagccacaccgtatatgtttaaatggatgagttcataatgactctttataagatcactagttacactggtggaggatgctaatgaaacagtcatttttttttaaagtggaaaatggaaggaaagaattgagcattcattctgtcttttctataagaactgtaccgttggacaactaaatagtagataaaaggaagtttcttttttttttttttttttttttttgagatggagtcttgctctgtcacccaggctagcgtgccgtggtgcaatttcggctcactgcaacctctgacttccgggttcacgccattctcctgcctcagcctcccaagtagctggaagtacaggcggccgctaccacgcctggctaatttttttttttaaatatttttagtagagatggggtttcaccatgttagccaggatggtctcgatctcctgacctcgtcatccgcccgcctcggcctcccaaagtgctgggaggaagtttctttttatagaactattacagctaatacatgaggaaggaattataaaattataatgttacaaatttgtatttaagccctaataaatcaatgaatctaggcattgagcatcatgaatactaatattaccagaagacagccagacacatttgcttcctgatgtaagacagtaccacgtgtgaagtggtctctcccacccagacagttgaatcttaatcagatcaaacatctaaattcacctagtaacttaagggaaatactgaagatgaaaatagtaaagaatagcaaggagatacaactttgctgttagtagcaagaaaaattgagattgtgggacactgtatagcacagacaactagtttcttcctccctccacaaaatctcaaggaaaaaatgtgaggggacatattttaaaattttaattaattaaaataaaaatttagatcctcatttgcactagccacatttcaagtgctcaatagctatatgtatctagtggctaccatattggacagtgctgatttagaacatttccatctttgcagaaggttatattgagcagttacattagtttcttaaggctgccataacaaattactacaaaatgggtgacttaaaataacaaatttgttccctgacgcttttggaggacagaagttcaaaatcaagatgttgcaaggtactggcaggacatatgggggaaaatttttttgtttgtttgtttttttaaataaaaggccaggtgtggtggcttatgcctgtaatcctagcactttgggaggccgaggtgggcggattgcttgagtccaggagttcgagaccagccttggcaacgtggcagaatcccgtctctactaaaaatataacaagtagccaagagtgatggcatgtgcctgtaatcccagctactcggaaggctgagacagaggttgaggtctcagtgagctagaggttgctgtgagccaagatcatgccactgccctccactctgaacggaattagaaaacagttaatttaaaaattcgatattctgtgtgtgtgtgtgtgtgtgtgtatgtgtggagagagagagacacacacacacagagaggtggagacagcgtttgtagctttgtgtgtgtgttttggctgttgaaattgttttgaatccagtatttttgagctgaagtttgtaaaattcaacaaaaggaaaaagtaatctgtttttggcaattgagtattggctaaacgttagaaatgtgtttgttcatgtttttaatatcttatgtatactgatgttaggatacttctatagagcttctcaaattgtagcacatatcagaatcacctggaggatttttaaaaacagactgcttgacttcatcctcagagttttcaacttactggcttggagatagggcagacagaatttgcatttctaacaggttcatatgatctgatgctactggttgcgggaccactctttgacaaccgctgcacaataattaaaaaaattaaaaaagataaaatatgtacggtaacaaagatctgtcttcgatgcatgaagaagctattctcataaatgtatattaaaaagcatgcatttgtctgttagagaatcatttggaaccttatgtcttgtgtttgtaacttgcacagcttcaatactgcaatgatcatttctacttttctctgaacaaaactcggttcattgtactgtatcgagtagtagtagtatgtacatggatgagagaagttcagagttagtgaaaatagtgaaaagaatacataatataaagaaaaaccgtgattccactaatagttatccagacaaaacaataaatttttagggaaatgtgtttgccagaattgttttaaattgtagtattaatatttatatgaacgagaatgaagttcagagttagtgaaaatagtgaaaagaatatgtaatataaagaaaaatcatgattccactaatagagagttacccagacaaaacaatacatttttagggaaacgtatttgccagaattgtttcaaaaagcaagggatgataaaaactaaattcagcattgtggttactcctccaggagagaatatttttattccattatttgtctatacctcacatacatgatacaaataattcttttgtttttagtagtcaataagaatagttaaatactaaagcaaaatactcttatttccttgatagaaaaatatcttatgaagaatgaaagctctctttggctctttagtggggcctactatcccttaggccagatattgctggcctaagtattcagcaggcccaactaaaaagcccaagggagctttattcttcataagaaattctaaagatagaatttctgcaatgatgggaaattttctttttaatttgtcttgtcaaatgtggctgtgactgagcaactgaatttttaattttaattatgtagttttaattgtgtaaaatgtgctggtggctacctcattggacagcacaactctaggcagtttagaacatagcttatcacttgagttatttagtctgttaattcttttatagaacatgcagtgtttggatggccgacattttgcttaggtcactcatttttgttttcttgtttactttgactcatacctttgtttcttatgtttaacaggaagtttgatttactttcttatgctttacattctgaaaattgagtctttaggataagaagctactggacaaagtttattgtcaacagtaatatgtacccataatgttatttgaaattttcataaaatcatgtttttttggtcagtttttaaattacttttcatcttttcattgactttatttaaaatatctctcccattgactttcctgagcccccaaacaaaattatttttatttaatttagtctataccttgagtcattcagtaaatattacttgcttgttgtgaaccatgcattcctgagagatgggcaatgatagtagaaatagatcctgacttatgatatgcttataaactatggaaggcaaacattctgttgtagcatgtttgaaagtgtttttaggaagcagaatgtgtctgagagaaacacgttgaatggtcatataatagttaaagaaatacagtaagagagtatgtgaatcagaaggggccaatgaaaaatgtttatagatttttagtattgctttccttagaagaaaaaaattacagatttctaccttgtatgttctttatttggtcacttgatggtcaaggagattgtgcatcaaagttcttagcagtattattcctgctatctaaatgttgtgaattcttaatgtatgacttctgtgacctgtaccctgaaaatcttcattacttgtattcatttgcagaagttttattggatactctgtgtaatgtaactgaaaatttcctgttaatcgtaacagtggatttgtgtctgtattgtatttccttagtatgtccagctttgaaggccaggtccagaatgtagaatagatgaagctattatagatttatatcctcatagtttacatatgtatcagccattgttcatttataagtcaagatttttgttttggctgagcacggtggctcatgcttgtaatcccaacattttgggaggcctagatgagacgatttcttgaggccaggagttggagaccagcctggtcaacataaagagactgtctaccaaaaaaacaaattattttttaaattagctgggggtagtggcatgcccttccgtctcaggcttccagttagcttggatgttgaaatttaattgctgttgtaacagtattaacaggtgggaccttaaagatgttattaggccatggatgggattaatgccattataaaagggtgagtttggcccccttttggttcttgcccttctgtcctctgccgtgtaagaatccgggcagtgtgcagagtgcaatcttggaagaagaggatggccccacaatacattgaggctgctggcgcccttactgtagacttttcagcctccagaactgtgagctagtaaatttctgtttataaattacccagtctctggcattttgttgttgtagtacaaaacagactaaggcactttgctcatgctgcgcctgctgttcatagtctttatctgacaccttagacttagcatttcctcaactcccatgttttactcccactactgtgacagccagatcagttgtcatgtcatctgtgcacacagcctccaatttcagttgtcttctcttttcctgtaggattttgttcattctgctagtcatgtttggctgtttactcatgtggctctcttctctcagatttgtgctttccgtgaagatagatattatttgtatgtttatttgggatgcctagcataacactggacatgcagtagatagttgttggataaattattgaatcacctaaattctcaatactcaagactagaggttgatatttgacatttatggaagattaggtaatcactttcatagatttatttaggtttagagcaggaagcctcatatttctgcattttcaataataaattccggactaatgatgatttatctaacaacatgaacttgtaatagtcatgtgggggacactacatttatcagaggctactgaaataataatcttgcttcaggagagtctttactgaaagtttactatatatcttggtttgttatgtgctgctataacagaataccggagactgggtaatttatgaagaacagaaatgtattctttcacagttctggcggctgccaagtccaagatcaaggtatcagtaggtttgatctctggttctaagagatgtcttgatgaagccatgcattgatgcctctttgctgtgtcctctggagagaacggatgttgtgtctttatatgatggaagagcagaagcaagagaacaaaaccacttctgcaagccctttttatagtggtgttaatctgttcatgagggtggaactcttaagacataaacatctcctgttaggcctcacttctcaacactgtggcattggggattaagtttcaacatgagttttggaggggccaaaaacactcaaaccataacacttatatacaattggtctttgaacaacatgggggttagaggctctgactccccacacagcaaaatctctgtatataacttttgactcctccaaaacttaactacgaatagccttttgttgaccagaagtcttactgataacataaacaattaatacatatttttcatgttatatgttttatatgctgtattcttacaataaaataagctagacaagtgtaaacattaagagaatcattgggaaagaaaatatatttactaagtgtaagtggattctcataaagatcttcatcattgtcttcatgctgaggaagaggagaggttggtgtggctgtctcgcagaggtggaaggggcagaagaggtggggagatagaatgggaggcaggataggcaggtacacttggtgtagcttttattgggggaaaaaaacacatgtgagtggacccatgcagttcaaacttgtgttgttcaagggtcaactgcagcttttcttgattctaaatttagatataatttaccaattcattcatttaacatttattgactgtctacaaagctccagagactcaggtaggctttagagataatagtggggagcaagaaacacataagctcttggggcttattttaaaaaagaataaagtaggtaaagagtgactgtgatgaataattcaaaactctaaagtttctttagttgatatgactgaatttaattttagacaatcacattttatgtgtttaattaaggtaattaaaatgctccaaacaaggttgagaattcttacgctttttaaaaatataggtaaattcaaaatcttttaattttgatggtgattacatgtaatacagatttgcagaaaaatccataattatagaattggtgctgactcactttccagtgacctgataactgtctgcatcatttaccattgtgaatgaattacccaagtcagttttcagacaaatttgcagaattaaccttagtaactgttgaacacattgctgctttaaacaacatattgttacattttttaaaagaaaaaaattaaatttgtaccttgattctgtaaaccatactttaatctttcaaggaggaagaatgcgttctctgtagaaaatagattaaatagaatcttctctcctagtgatttaaattggtttaattaaaaacaaattctatatctgcaagagaaacagttgctcatctaattcaaaaagtaactgctaattgagaagtcatttatagtctgtcttaccatacattatctgatttccttgtagtagatatacattctgaattgcttttgaagtagcatcagagtaggtagtaaatatgtggtaggtgttagtttgggattaaaatatgtaacaattctgcaaatgaattatataaaatggtcatattgagggactacacagtatatgaaggtcagatgacatatttggaagcacattgagagaaacaaaatattcttacacaaggttgttgttagaaatagtagtagcagtgagaatatgggacattcttaatgattcagaattgctggcatgcctattttctgtgaaccttgatatgtattcaactctgtcctgttacctttgtctcccgtagtcattctttgactgctgctgctgcctgtagtccactgtaagcctctcttggcaaaagagagattggtaactattagagagagaagttaaagacatgagccttattgtggcttgtttgcttccttccttctttccttccttcctttctccttttgtgaatggaactgatagaaggttgcatttctttttgcaagaaagctgtagagggaaaataattatataaacctgttttttaaaatacaaagatattactgcacagttctttagcctcaaaccttgaaattggatttgccttggaatccaaaatattctgaattttaaaaactgtattagtggtaaatactatatattatgtaacatttcctagagagatctattgcagaaccctataatcaaatatatcagcaattctgaattgaaaaatactaatatgcatttcagttcaggtcaggttttaccgtcaaataagttatgtaaaactttagtctttagaactttgtggattttaggattttgttcaaggggctaggcacggtggctcaaacctgtaatcccagtgctttgggaggccaaggcaggaggatcagttgagcccaggattcaagatcagcctgggaagcaaaatgagactccgtttctacaaaaataaaaatgaaatcagccgggtagggtggcacatgcctgtcatcccagttacttgggaggctgaggtgagaggatcacttgagcccaggaggtcaaggctgcagtaaactatgattgtgccactgcaattcagcctaggcaactgagtgagaccctgtctcaaaaaaaaaaaaaaaaaaaaaaaaaaaaaaaaaaaaaaaaagaagaagaagaattttggatcaaggattattgacctctttttgtttagtgtttcttaggatatgtagaacctattcttgtgaagagagaaagatacgttgttcttctgttttcacctttatgaaccatatatgtttctggttgaaattatgtgtataaacacgtgaacacatttatacattatacatatatgtgcatacaactatatacaaatttaggaaaagcatgtgcatggtgtgtgtgtgtgtgtgtgtgtgtgtgtgtgtgtgtgtgtgtgtgtgtgtgaagggtggagagggagagaaaggtggatggttgggacaaggggagtggttaaccgggcctgttagcattgtttcatccttgtgctagctcaggtttggtacctaacatggtgtgaaataagaccttaattgcactttcacagctgtgtttagcacgtaagctgatcatgaacaaattctcttgtcagagataaaagcttgaaattccaagactatgtaaaatcacagacaattagagtgttctgtgtaccgtacaaaataatggtaaaaaaaattcaaacggtcatagcacagtatagtttaaactgctgttttactaattcttctggagtgagaaacattttctgtagtagttaagcacccaaagaagccattttaccttgcctgttaaaaaatgtgtgcaaggtctgtggttcaagattgagaatgaaggatgtgtgagccaattgaataggtaataggagttcaggtaagcagtttaggtaatggtttaaattggagaaaggccagaccatagggattaacaccctaccattatgaaaagtcccataagatctcagatgacctcaagaggcttgtacttttgtttgttaagaacctttgtaagattgtgctaagacaccgtgaaaaatactgaggctgtaatgttgcttaaccatctaagtaccagtaaatgtggtagaaattatctttctactcaattatagcaactaaaagtcaggccctgaatcagtcagaggaaatgaactcttgggttggaatgcacataatttctttttatatatcaaaatgttcagtatttctttgaggtcccagatctgaacaaacattatttcatgagaagatacacttttatttccttccagtgcttctacaatgctttttctccaatcccgtgttctttgctgacaacagcaagtgtgtgttctttgagaggtcaataaatgctgatttctgcaagaaaactcttaggaagtgagcctagacattgtgaagaggaagtacaaagaatgaggcaattaaatgaagaatattgcaaaggattattttaaattgtgagtcagaagccaaactaattttgactactaaaattgtgagtcagaagccaaactaattttggctactaaattagttacttccctcgggcctaccaatcttcatatgtataccatggcttattttgacttagctggttaatttatccagatacgtagatggtagcaaattggcattatcaaactctactttttcataccaaagagcaaaataagtgtgcttataaccgtagttcctgtctttataaaaatgtatgaataaatttgagccatgtaaattaaggttacagaacagatagcatttagtgaagaaaagctggtccttagagtatatcattatttaccccatagtacctacctaatgaaatctagttttaatgattctttttaggacaccaaagctcatgaagcctattacaataacgtgtttaattctgagtaattgtttttcctatttaaatgaagaactcagtgactaaaaatttatttcctgcaaattttcttagatgatagaagttatacgtagtaaaaccaacaggaccaactgtgaggctgaaggaatttcagttaagaggttttaatttttatcaatttaaactgtgttttgaggagtggacagaaagggaagagggatattttgagatcacccagcagtttttgatcttttgtcagttcttttgtaatgctatagatgactacaatttgaaacttgaaataagaaattttttgtattgggtgattcacaaactgttgggttttctgaatggcttaaatcctttaaagaaacagttttaaaaagacatagcatgagaacaggatcataattattctgtaaccagcagtctgtgttggttacagaaagtatgcttttgtttaacattataaataaattaccttatattgctgcttacgtttctggtttttggtgtgtatgttatcaatgttgaccaaaattaactgaatatggtgacaaaaccagagaaaaaatttgagcttctgttgataaataaaatgtaaatgctactttttgaaataaaactttacacttataggcttttatgtatgatctgtgttttcttgaggaaatgttgattaagtagtttccattttggtattacagtatgtcctgttgtaagtagctgactgtgtaaaaatcttttaagtcaaaaaagcagctcagcttaaacccctactatttattatggcagaaaccagaaatagaaatcttccagaagttttataatgtattacattcctgcatatcttttggagtaaaattaaagttttaaaaagaggctgttcacaacagaagttactttatgtatccttatgtatatccttatatacacagtatcttttaaacacaatttactaaatacgtgtctgcattttttaaaaaagaaaaccctagcccaaaatgaatgacaaaattgtctcgttagatttgtaagatgtgttgttaacctataaaataggtgaattaagtataattctgacaaaattagttacatgtaatacatagcaggatgtacttgtttgggatgaaacaaaaaatcttcaaagttttctatagtgttttctgttaaggaactcgtttattgatttattgaagatctttggctgtttttgataataaaagaatcttggtctataatattactaattaataaataagtttttgaggataacgccaatacttgaattttgatatctacttgcaacatgcagtaatgcaatatttagtgagcttaattagttgctttttttttttccaccctgagacaagagtttcgctcttgttgcccaggcctggagttcagtggcgcaatctgggctcactgcaacctccacctcctgggttcaagcgattctcctgcctcagccccttctgagtagctgggattacaggtgcccgccaccacgcccggctaattttttgtatttttagtaaagagagggtttcatcatgttggccaggctggtttcgaacttctgacctcaggtgatccacctgccttggcctcccaaagtgcagggattacaggcttgagccaccgtgcctggcctaattagttacttttaaatgttactaacagaatctgaggagcgtggtttgtgtcctcagaataaatgtttaagctttgagtgtctgcctgtgtcatgaggaaaacagggagaggagaaaatttcttgttgctgctattttatttgcatttaagactagtcattgttaggtaactatggaatcttcactgctttacagttttggtgcatgtcaggttcaataatttttactttaaaaagttatttttacattttaatgagattaaattgtttaccaattaacattgtactataaaaggaacagaaatgtgactggcacttggaaagaaaagctgtcatctgtagactgatgtgtggtattctaatttaaattcgtggtttggcagaattaaatttggattttaacatcatccagaagtaaaagttatgtgcattttcaagataaactcaggaaataaaccatataggaaagactcatttttgcttcagaacacagtaaagatgaaactttgaaaatgctttctaatcattcagtgtaaacctatttaccaagttaaactggtcatgtgatatttcatatatcacttgtattagtatgtggtcttatgcttataaagttaatgtgcttaaaaataacagctaaaacatataggcagtgattattaaacaagaacattaaaatacgattcaaaattgtttaattgtaccttttagcagaaataccattttaaaagatagtaacattttattttctgtcagtaaaaatatagtcatgtgtcacttgacagggataagttgtaagcaattagttattaggtgatttggtcatatgaacttcatagattgtacttacataaacctagggggtatatagcctactatacactagactatgtggtatagcctgttgctcctaggctacaaacctgtacagcatgttactcatcttagtatacagaatactgcagacatttgtaacaatgtgtatctaaacatagaaaaagtacaataaaaatgttgttgtaatcttatgggacctgtcatatatgtagtctgttgttgacccaaatgtcattatgtggtacatgactgtatttttgtttgaactgtttagtgactgtcaacaagaaattgtactgtccaatatgacttaaaatgttagttgctatagttataaagagcacaaagagtgtgcatatttaggattttggtcacagtttttgcactgtgttttgaaagaaacattgaagctaatgtgaatgtagtagacaattagtatttgaattgaactttaaagtgtattatgtgtctgaaattaattccagagtagtgaccttgaaagtccagatcagcaactctgacttcccatgttcaaaacaaagggccttttcttatttatggatggtaaaagatgtaaaaataccatcttaattcttaacagtgtgatgtataggtaatggtgaataccacagtgttactgaagctgtatcatataactcaatagctaaatttaagtaattgatatttttggtctatattttcttttaaaagtatactataatcgtgtttaaactgtttactggttatagcaatgacaatttactttgcaaagtatataaaaaataaagattttaaaaataacattttccaagagatgactatttattgacattttgatgttgatttcctagcttttttctctgcatatattacatattatgcatatttataccaacatttaaattaggatcatactgcttctgtaatgtattagattttaacattagaaaaaatattttaagtcctgcaagcagagaatggtgtttgcattttaaatggttatagtttaaatggttatgagaccctacattatatcctcatttttcctcttgacctgcaaagcctaagatattttcgtatctggcattttaagaaaaagtttgctgaactcttctctaaaggaaaaactgtgttctcctacagattctgtctgcagcattctctccttgcaggacttaaaacaaaacaaacaaaacaaaaaaaccaggcagctgggtggatttagaaatcctggctatagtttgcaaacctttgctttagaagtttgtttgcttatattgtgtttatattttacagtgtgtgtgtgtctgtctttctaaatctttcttgacattattgcctcaaaggcactgagacagcgtgtgttaaaacccaaggacacagattgtaattctagtcttattgctgtaggaatcagtttgctggtttctagagggtgggctgaccttgacttagtaaagtatagtactttttgtctccctagtagaagtattaactgacctttaaagtgaacttgatgcaccctcttcaggaaacaggaaactgttacatttgggtgtgatattaggagatgaggatactgtgtaggaggtgttggacctgcctaaagtgtttggccttgaaatgtcaaggttgctctcccaaacctagttttccttgacctggctgtttttctaacttcagagacggacttaaacaatagagtttattagattatatgtctgtgtaaacaaatgaagattaaaagacaaaaaataaagtagttaaaaatgaaatgtcttactttttcttgttttaggataaaaattgtattaataccttaaaatgtattcagcaggcaaaaacttcggtagtttcggtattacagtgacaccatttatttttaggcatagtcttgtctttttttttttttttttttggtaaatattataccattttcaacttaatgtgaaaagcttttccagttaatctttatcgtgtgtgtgtgtctgtgtgtgcgtgtgtgtgtgtgtgtgtgtgtgaaagaaaatgtgttttaggcagcatcagtagagcaaaataagatttaatgttgttacttcaaaactgtatccctaacaagacgatacaaaattcagagtgttttggccccttttctaggacagatttagaaacttatagacttgtagttataggataaatgtatgccaaagctttcttcaaagaaagctccatcataaggtggtttttcttcgtggtgcttatattttacaggaacatttagagggatgtggtgtttctatttttctttgcccttctaatcagcaattaaaaaaatattggatctacaggtttggggggtaaattctattgcagatttgttattaacactactctacatatctgttggcctgtagcatacttactgcagaacttgtagcttgatagcccaatgtgttcttgggttatgattctgaaatactgctgagctttaaaaactttagcagctttgaccagaacacctacgttaaaatttctttataactcttcagaatttttttctttttcttttttttttttgagacagggttttgctctatcacctaggctggagagtgaagtggcataatcatggctcactggagcctctaccttccaggctcaagcaatgctcctacctcagcctccacagtagctggggccacagatgtgcaccactgcacttggctaatccttaaatttttttgtagagatggggtctcaccgtgttgcccaggctgctgtcaaactcctgggcttaatcagtcctcccacctcagcctcccaaagtgctgacattacagacgcgagccactgtgcctggccagtcttcagatttgttaacaaatctcaggggtttgctttagtctcccaagctcgccttacgtaaatgtgtcatgtaatgaaagatgatattcccaacccaccatctcacatattcagttgattttcactaaccgtgaaggatttgcactgatttatgcatccaattctctcctgatttctttacttttcctcctcttttctctttcctcaccagtcttccgtttccatctaatgactagtgtcccacattggacaagataaaatggttgaccagttagagacataggaaaaagtggaatattgaatttgcattgaaagggctgaacttgtgaccttatgttatcttccatataattctaattgctacaatataaggttttaatttactcagttcagaaaatctaattgtttgacagtaaagtttggacctatttatataaagtttggaggaaatatgatcttatcaatatgcactatggaaaatgtcctttttagtctgtgaatttagagctatacctactgcttgaatgaagatggtctaaagatttaaaagacatttagggttaataagttttcatggcaaaacatttaacatttttaaactaaattcagatgagttactcattttttgtgtaccttaattccttccaaatactcttctgtcagaactacaaagttaaatctcaattatagtgcccttttttttatttagggaaataattatcatcattgattaatacattgtacaagggttaactgtcttttaaccatcagggtatagaaaaagtaagttggttaaaacaacttttaagtttattatggagataaacactattgtcatatgattctttagatttccttaaaaattgatctcctatgccaggcacagtagctcatgcctgtaccctagtactttaggaggctgaggtgggaggatcacttgagaccagcagttccagatcaatcttggcaatacagtgagatcgtgtctctactaaaaaaaagccaaaaagaaaaaaaaaaaacctagttgggcatggtgatgtatgcttctggtcccacttactcaggaggctgaggtgggaggatgatgtgagcccaggaggttgaggctgcagtaagctgtgatcattacactgtagtctagcctgggtgacagagtgagaccctgtctcacagtaaataaataaataaaaatttaagccttgcttctaaatccagtctcctttaattaagttttattgccacattctttctgcttttaattttttgttgttgttgttaaaactaaattttacagcttttgtttctcacgtagcagccagggtttgaaagagattaagggtcattcttctgaaataaaacatgtcctgaataattttaatttgagtctactattgaaagtcacataacattttgttgaatggtgattcttacctaatcacctgtaaatggatcacagacacaaatacctagtgatgtgctatacattatgccattgtgaattttataaaggctaaagagtgaggaagtagagttcttcttttctgatagtgcactacaaaattttgaggaccttgcagtgatcatctgtagtcataaaagctgtttagccaaaacatgattggattttattaatagtgttacggctatcttttcatgagttagttaccatgtgaattagtgcaattttggtgaatagaagaatgcttaggactattgtcttattttaaattaccgattatctttttataaggatatttgaggagttcatgtgtcagtgagaattgagcaactgagaagaagttagaggttagttcccttttccaagtatgatggattaaccacatgcaccccgtctttctcactgaatgcatctataaaacctaggcaaaatggatggaactcttctggactctgcagaataaataataccaggtgggatatgaatgaagactagcgttcagaataccatctcactggctgtgagtttaccattttttttttcttccagcatccccagacaacttaacacaatctaaaacctaaaagtggggcaatctgaaacagaaagctctaaaagacgcctgctacttctggctcaaggaacaggaaagataactgctaagttcagaatgaaaattttgtcattttttttgtcttctccatctctcatgccctattcccaagcaaccgtgtggtaatggcagcagagactacagcaggagcccatggtcaaaactgagggatgagaactttcctctccagttgacaaatcccattgctttttctttttccttcttcatctctttgttcttccatttcttgtttccaagtcagatacagtatcagaagtgtgacccaagaagagtaccaaagatgcagcattctggatgaaggaattaaaagggatgcctcagagaattggaaagtactgagaccacgtgtaaagagaagcttggaaaagcaataccataaagttctttatgaattccctgaactatacatacttggaaataaaggctgtcacccaggctaaccattcgatgatacaaaagtgggacaaattcagatggcacagcataagcctttgaaagttgaactgatgctggaaccatggctatagaagccatgttagagctcatggcctaatcctaaccaaatgaatcacttgttaaaacaaatatattaccagtgtccacaggatttaaacaggaaccagagtttcatagcaatatgttaaaattcccaggttataatccaaaattagctaacatatgaagaacaaggaagatttcaactcacatgagaagaggtgatcaacatataccatcatgataataacgttggaattatctgacagagattttatggtagctattataaaatgtttcaacagacaattgtgaacactcttgaaatgtatgaaaaagtctcagcagagaaatagaagatacaaagaaatggaaatgttagaactgaaaaatacaataagttaggggaaaaagaccactggatgggtcaatagcagaatgtaatggcaggaaaaaaatcagtgaacttgaagataaatcaatagaaatttttaaatctgaacattagagaagaaagaattttaaaaaattgaacagagccttaggatattatgggaaaataacaaagtgttagacatttaaacaagaaccaaaatttcataacaatatttttagacatccaggttgtaatccaaaatctaacatatgaagaaccaggaagatttcaactcacaatggaagaggtagtcaacatatagaaagaatgtagttttgagaaaatatttgaagaattaaatggctaaagacctcacaaatttattgaaagacacaaacatacagattcagagaatcagaaatggaataaatccaaataaatttatgcccagatatgtcataattaatctgaaaactaaaaacaagaaaaaaactattgaaagcagccagaggaaaatgacattgctccttggggggagcaatgattctaatgacttcagattttacatcagaaaccatgggagtaagaataaagaagaaaaaacaatttgttcagtactgaaagaaaagaactgtttataactagcaaaagtattttttaggaatgaaggtgacataagggcattttccggtaaaggaaaaactaagaatatctgttgtcagcagacgtgatctaaaagaattgctaaaagatgttcttaagacaaaagggaaatttatatcagaagaaaacttgacattaggaatgaaagaagataaacagaaatggtaaatatttgggtaaatattgtagatggtttttctcctcatgaattctttaaaatacgttggataattgagaggaaaagttataacattatctgatgtgattttcagtggctgtggcatcaaatataacatctatgatccacttgaagagtaaaatattgattccaaatagaccctgaaaagttaaatatgtatgttataatccctagagccactacttacaaaataagtaggtaggttagaattacaatggataaattaaaaaatattcaaatatcatgctgttttggttactgtagccttgtacagtttgaagtcaggtaatgtgatacctgcagcttttttttttttttttttttttttttttgcttaggattgctttggctatttcggctctttttgggttcaatttgaattttagaatagtttttttctagttctgtgagaaatgacattggtagtttgataggaatagtgttgaatctgtaaattgctttgggtacttaggtagtgtggtcattttaatgatgttgattcttgtaatcagtgagcataggatgtttttccatttatttgtgtcatctccgattttctttcagcagtgttttgtaattctccttgtagtgatcttttacgtccttgattagctatattcctagatattttatttttgtggctattgtaaattggagtgtgttcttgttttggctcttaggttaaatgtcactgctgacttttgtacattgattttgtaccctgaaactttattgtagttgcctatcagctctaggagccttatggtatagtctttagggttttttaggtatagaatcatgtagtccatgaagagagagagctcatcttcttttcctatttggatggcttttatttcttgctgttgcctgattgctctggctaggacttccagtactacattgaatagaagtgctaagagaggcatccttgttccagttctcaaggggaatgcttccagcttttgcccattcagtatgatattagctgtgggtttatcatggattactcttattattttgagttatgttccttcaaggcctagtttgttgagggtttttatcatgaagaaatattggattttattgaaagctttttctgcatctattgagatgatcatttggtttttgtttttaattctgtttatgtggtgaatcacatttattgatttgtgtatgttgaaccagccttgcatcccaggaataaagcctacttgatcatggtgaaataccttttgatgtgttgggggattcagtttggtagtattttgttgaggatttttgtgtctgtattcatcagtgatactggcctgaagttttctctttttgttgtgtgtctgccagcttttggtatcagcatggtcttggcacaaaaaaagatgatgcaacagaatagagaacccaaaagtaaagccacacacctacaaccatctgattgttgacaaagtcagtaaaactaagcagtggggaaaagacttcctattcaataaatgttgcttttaataactggctatccatatgtagaagaatgaaactagacccctacctatcagtgtatacaaaaattaactgaagatggattagggactttaagacctcagactttacaaatcctgtacgaaaacctggaaatactcttctcaacattagccttggcaaggaatttgtggctaagtcctcaaaagcagttggcaactaaaagaaaaattgaccaatgagacctaattagagagcttctggacagcaagagaaactatcaagggagtaaacagacaacctacagaatgggagaaaatattcacaaactatgcatccaacaaggtctaatgtccaaaatcttaaggaacttaaatcaactagcagataaccccattataaagggacaaaggacatgaacagacacttctcaaaagaagacatacaagtagccaacaaacatattaaaaaatgctcataatcactaatcgtcagagaaattcctatcaaaaccacaatgagataccatttcataccagtcagaatggctttgttaaaaagtcacaaaataacagatgctggcaatgctatggaaaaaagggaacacataacactattggtgggagtgtgtaaattatttcagccattgtgggaagcagtttggagatttctcaaagacctgggagttgaactaccatttgacccagcaatctcactgctgggtatatactcaaaggaaaataaattgttctgccaaaaagacacatatacccgtatgtccattctaacactcttcacaagagcaaagacatggaatcaacacatgtgcctatcagtggtggattgggtagagaaaatgtggtacacatacgcaatggaatactatgcagccataaaaagaacaaaatcatgtcctttgcagcaacatggatgcagttgagaatcatcctgtgggaactgatgcagaaaaagaaaactgtacaccacttgttctcacttacaagtgagagctaaatattgggtacacatggtcataaatgagaacagtagacactggggaatacaagagggggaggaagggaaaggagtaagggttgaaaaataactacttattagatattgtgctcaccacctgcaggagggattcatttgtcctccagacctcagcaccatccagtatacctatgtaacaaacctgcacatatacccccagattctaaaataaaagttaaaaaatattcaaataacccaaaagacaggaaaggggaaacagggattaatgagaaaacaaataataaaatggtagatttaagttcttacacatcagtaattacgttgaatttttaaatgctgtaaacaaatcaattaaaagtttgtcaagagtccatagaaaaaacccactttatgctgtctattggaaacttactttaaatatggtataggtgggttaaaagtgaaaagatggaaaaagatatagcatgcaaacactattggaaagaaaaccctagtggctatattaataacaaagcaaacttcagagctaagctaatacccaaataaagaggaacattacatattgataaaagaattgatttgccaatcctaaatgtgtaagtagctaacaacagaatttaaaaatagatgaagcaaaatctgatagaacttaaaggagaaatagggaattcaataattataatagaaaatttccacattcttctcttacgaatagaactagtagacagaaattactaatggtatagaatgcttgaaggtggtctgggcgttgtagctcatgcctgtaatcccagcactttgggaggcctaggcaggtggatcacttgaggtcaggagttctagaccagcctggacaacatggtgaaaccccctctttactaaaaatacaaaaattagttgggtgtggtagcacgtggttgtagtcccagctactagggaagctgaggcacgagaattgcttgaacccaggaggtggagactgcagtgagccaagattgtgccactgcactccagccttggtgacaggggtgaaactctgtctcaaaaaaaaaaaaaaaaaaaaatgcttgaaggagactatcaaccagataaatctaattgacatttgtagtatgctttacccaataatagcagaatatacattctttccaagtacagaaggaactcagcatttataattgaagacttcaaaattcttttcttaggaatagatagaactagtagacagaatcaccgggggtacagaatgtccgaacaacattatcaactagatagatctaattgacctttatggaatactttacccaacagcagcagaatatacattctttccaagggaacaatgctctaagacagactgtatctcggtcttaatacaaaccttaacaaatttaaaagaattgaacttacaaaaaatatattctcagatcataatggaaatatattagaaatcagtaacagaaagataacacagaaatctccaagtacttagaaattagacatggctgggcgcggtggctcatgcctgtaatcctagcactttgggaggccgagacgggcggatcatgaggtcaggagatcgagaccatcctggttaacgtggtgaaaccccatctctactaaatatacaaaaaattagctgggcgtggtggcgggcgcctgtagtcccagctaatcgggaggctgaggcaggagaatggcgtgaacccgggaagcggagcttgcagtgagctgagatcgcgccactgcactccagcctgggtgacagagtgagactccatctcaaaaaaaaaaaagggaggggggagcggggagaaactagtcaaagaacaaataaaccccagtaacaggagaatcaatgaattaaaagcagtaaaacagtagctaaaatcagtgacattaaaagttgagtttccttttttatagatcagtaaaattgatcatctttagcaatacagcagaaaaagggaagacataaaaaactagtatcagcaaccaaacaggggatatcattacaaactccacaggaattttaaggataagtgatactaaaaaactctatgcacataaatttgacaacttaggtgaaatagactaattccttgggacagtaactaccaaaactcacctaagatgaaacagatgatcttgtatagtcttttaactattaagttgaatttggccgggtgcagtggttcatgcctgtaatcccagcactttgggagggcaacacgaggggatcacttgaggtcaggagttccagaccagcctggccaatgtggtgagaccccgtctttactaaaaatacaaaaattagctgggcgtggtggtgcatgcctgtagtcccagcgcctcaggaggctgaggctggagaatcccttaagtctgggaggcagtggttgcactgagacaagatggagccactgcactccagcctgggtgacagagtgagactctgtctcaatcaaaaagaagagtttaattcataattaataaaaaaagaaatattaaactcctgagctcaagtgatccacccacctcagcctcccaaagtgttgggattgcaggcatgagccactgtgcctggcctaaacttcatttcttaatcaaatgctaaactttctcatttttctcttgttcataactaggagtattcattcacttgtgcagtaatatttgaaagacagaacacatttcctatacttaaaatctgtgagcaactttctttttgaccttttgtaatctacttcatctcttgaaatctgttttgtttaaattttaaagacaggatctctctctatcaccagggatggagtgcagtggcaccatcatagttcgttacagcctccgtctcctgggctgaagcgatcctctcgccttggcttcccaaagtggtgggattacaggcatgagccactgcacctggccagaagtctgtttttttttttttaaacatataaaataagggatgatattacttttctaaataacacatgggtcaatgaagaaatctcaaaagaaagtgttttaaactaaatgaaaatgaaaagtttatcaaaatttgtgatgcaacaaaagcagtgcttggaaggaagtttgtagcattgaatgtagaaactagacaaaagattgaaaattaatcatctgagcttccaccttaggaagctaatgaagtacaaattaaatccagtataagcaaaagaaaacatgataaaaattaaagcagaaatcaatgaaattaaaaataagaaatcagtgaacataaaaactggttcttcaaaaacataaaggatgatgtttttccagtctaactttgtttttattatctgtgcctccttattaatgatttctagtactgcacaccaagcctgattatttttgccactgaggtatgatttgtgtcaaatttaccattaccagggcttggctcctatttcttcattttagtttttcactgctgaaattctttcttagtgctttattttgcagttgtcctgtttattatgactctacagccatttttttcctagaaataaattttgccttttctgtaattattctagtgcttttatttttaaatttttaaaaatttaaaaaaaattttttttttttttttttttgagacggagtcttgctctgtcatcacccaggctggagtgcagtggcgcgatctcggctcactgcaacctgtacctcccaggttcaagtgattctcctatctcagcctgctgagtagctgggattacaggcatgtgccaccatgcctggctaatttttgtattttcagtagacagggttttgccatgttggccaggctggtcttgaattcctgacctcaagtaatccgcccacctcagcctcctacagtgctgggatttctaatgcctgtttatatttcattgtccaggaattccacaaattgtattattttttgtaggtttcacagatttgaataccagcctccaatatttcagtaagtatttccaccaaaaaggacgttcttctacttacaccacattattttaacaaagaaaattaacagcaattcgctgacatgatttctatttacattccccagattgtccccaaaatgtctttcatagatttaaaaaatattcgttggatttgattgttgcatgttttagtttcttttcatttaaaatagttttccttatacctgatgtttcagaaagcagagcacctgtctagggatgtctcacattctggatttgtctgactttccttgaagggtcattcatgtgttccactctctcccatttttcctgaaacattaatttttttgtcagtaaaatttcttaattgatgctatatatcatcacatcaataggacatattttcgagtgactggttcctagttctgcctgcttccattgtttattctagaggttgtcttttttgtaagagttcaaggagaaagccacaggagaaggattgccactgtctttggaaagccacaggagtaaaagagtgagtccagatatggaaggtgttacaacaacccttacataactgtccggattgaaggagagcatgaaactttctagaaagagagaaaccaataagccttgaatttgaatttgagattataggtattttgaagttgagaagcgtatctatgtccctagtttttctaaatatagttttcattgtccatgttcagaagtcaatgattggagcacaagtggtgacctatgcttagtagctctaaaagactaaaattaggagttgtctcaataggcaaagacatgatggtgattgtgttgtgtgtgcaagatgaagagatggggtgggagttgttgggggtatagttacctgttccacatgccccatgagaaaacaaacacttcttgcacatcttactgtccagaaaattgagaacacaaaggaataaccaaatacgctttacaaaaaataaaaagcctccgtgtttcctccctaggcgagtgcccttaaaatcatactcaatcacaatgtttacattatttactatataaagtctattaaaacaaatattatccacctaacacatatatcttcatattcataaacctgagattttctgtgtagtgacatctacctatgttgattgactataattaattgactccttctgtattttttgacacaatacagagtactgaactagcaaaagacagttatcggtcaagcatgtcatttctagattcccacatagatatatcccaattcaaaaagaaaactaagtgacttgagagaagtttctaaaagctttccttttgactgacgaactgtcaatcgaaacggagacttagttttcattctctgtctctataaggtttcacgtttaaacagataaataaagcagacagtctatggcgcttctcatgctgtactactgtagcagtttgcaggtaatgattgattcagatgaatcctttacatactcgcacctggaaaaccaacagatgatatgaattctgtatctgagaaaagaggatcacttctaaaatcagtgaattgaatttactggtaagctgagagtttaccatttaaaactactgtacatctttcatagtatgccactactaggttaacagcaaacttagaaaaattcattcttctacaagaggaacatgataatttcctaagggcttttatatgagaaatctaaccaacatttattcatttctgaaaactttttctgcagatgcccacttttctatgggttgaggaaatctggaggtaatgtaacatagggtaatgggtaacttcagtggcttctcagtcaaggtagtatggtctataaagttgtcatggacaccgaattagtgaatactgaaccactgctcctaggggaaatacagggttaggtacctgtgagcatctggtcacagcatttttgttaactgatcaatacatgttttatgtgtgtttctgtttaaagacatatatattgttgattcattaacattgagctcacaatcaacaaaacaataactcattcctgaactaagtttatctaacacagctattttctccatgatgcacattgtaggtttcttgtgcttgagaacactaggcagcacttacaatgacttgggggccatgaaatagtgaaatcatcaacaaaaacacaacaatgcaaaaacgtggcacaaaataggctactgaaaggactcttgtttacattataagagctgaagcaagaaagcctattcgttgtctgctgggaatgtgcatgtttggtgactcagattttttgttatcccgtgtgtgtctgcaaatgactggaagacccagctactgtacaaataaattttattaaataggcaaagttgcatatattgaatccgtgaataatgaagatcaactgaatctaatggtccttgggtacctatgcagactgaagaaggaagctagtgttcttatttatttcctttgctttcaccttcttcctctctcctcagtatttggttggcttcataagcaaacttaaaatcaaatagaaccttttcttgagattccattttgtaaaggtttgttggctcgggcttcttacatggtagtgcatcagtctgccttcattttgagggatagatgggctgttgaccttaactgaagaaaattggtttttgtttttttttcctcagtgatgtaatttctataaagagtgactctcactttaagttatgataaacttttgcttttttcatataattaattttagctgtataattattctcttctctcctgagaatattgataattaaaaattgagctaaagaacctaaacgtaggtcttaacatttgttcatttctttctttctttttttttttttgagatggagttttgctcttgtagcccaggctggagttcaatggcaccatcttggctcactgcaacctccacagttcaagcgagttcaagtgattctcctgtctcagcttcccgagtagctggaaatgcaggtgtgcaccaccatgcctggctaatttttttattttttatttttttgaggcggagtctagctctgtcgcccaggctggagtgcagtggcgcgatctcaactcactgcaagctccgcctcccaggttcacgccattctcctgcctcagcctcctgagtagctgggacaacaggtgtgttccaccacgcccggctaatttttttgtatttttagtagagacggggtttcattgtgttagccaggatggtctctgtctcctgaccttgtgatccacctgcctcagcttcctaaagtgctgggattacaggtgtgagccaccgcgaccgaccctatgccaagctcatttttgtatttttagtagagatggggtttcaccatgttcatccgtctggtctcgaactcctgacctcaagtgatctgcctgcctcggcccccaaagtgctgggattataggcgtgagccaccgcacccggcccattcatttcttaaattgtgagtttacattcagttctctatgttttcaagaaaatttagaaattcattctgatctttagagtattagctatactatatgctgttttagaggactgttttttcttccattcattgaaagcattttatgttcaaaactttgtgcctgagggagagataccagccaaatattatgatataaatatctctctactactatttttaaggatagtctttcctttgaagacatatgatcagggtgtcattattagaaaaacattagttgatacttcctagtatttctgggtgttcttaggtattctttaaataaacaaaaatagataaagcaacaaaacccatggtggaatatttggagaacccttgattaaacaaagttaaattgatttccttagcatacctctttaatactcatgtacatttttttaatctcccagaagaattctagtattgcatatactatataaacactgcacgtgtttcctagatttatatgattgtggtattttttgtgagaggtagcttaagggatcagtggtctgtggaataaacttgaggaaatgctgacttagccttccttcaactgtctcccatagatctcatttctgctgttgtagcaaaacagaatgaacctgtatcctcctctatataacagtttttgagtattttaataattttttaaaaatgtattttaatttttgtttttgtttttgtttgtagacagggccttggtctgtcacccaggctggagtgcagtggtgcagtcatggctcactttaagccttggcttcctgggctcaagcagtcctcttacttcagcctcctgagtagctaggattacaggtgcatgccaccatgcctggctaatttttagatttttttgtagagacagggtctcactatgctgcccaggctggtctcgaactcctgacctcaacccattctcctgccttagcctcccaaagtgctgagattacaggtgtgagctaccaccctcagtctgagtattttacggaagctaaatagtcaccctaagctttttattttccaggtgaaaagtccgctgcccttcagtggattcttattatactcttatttggtagaccttttttccaaacttactgtattttattggatatattgctattacttttattagactgtaaggtcatttatgacaagggatgtctaatttttctgtggtttgcaatgtctgtcatagtaccattcatgtactatgtgcttaataataaattgaactgaacactcttttatgatttttatttcagtatattatcaccacaaaaattaaaaggaaccagtgatgtaatagatatttaaaattccatgttgagattagataaggtttttattctcacggactatacttatttttaccagaaattatgactttgccagtactggatttaagattgctattaattttttttttgagatggagtttcgctcttgtcacccaggctggagtccagtggtgctatcttggttcactgtaacctctgcctcctgggttcaattgattctcctccctcagcctcccgagtagctgggattacaggcgcctgccaccacacccagctaatttttgtatttttaatagagatggggtttcaccatgttggccagggcatggaggctcacgcctgtaatcccagcactttgggaggtcgaggcaggtagattacttgaggtcaggagttcgagatagctattcatttaaaattactttccttttgaaaatgattggctgggtgtggtggctcgtgcctgtaatcccagcactttgggaagctgaggagggtggattgcttgagcttaggagtttaagaccagcctggccaacacagcgaaaccccatctctaccaaaaatacaaaaaatgagcgagtgtggtggcatgcgtctgtggtcccagctacttgggaggctgaggtgggaggattgcttgagttaggaggcagagggttgcagtgagccgagatcgcaccactgcacttcagcatgggtgacagagtgagacctcatctcaaacaataacagcagcaacaacaacaaaatgagatatggcaattaacaagctagataaagcatatttggcaccatgttaactagatttttttaggtaagtactttgaggaattactgcttcgtaattgtgtcatttgtaaggttaatgaaatgttttaaagatcttagcttctttcagagtctatacattgtattctacaaagtataggtattcacatcgtatgtgaaacatttcctcagtttctttttaaagaaaattaagtatcctgatatatagctaaatattcttctgcaagaaacagtaaaccatgtagatgaaaataaggttatttccttatctaccaatattaaaatgttttcagaaaggcaagcatggggtcagtattttctgtctttccccacaactatttgtagaaagacattcctagcaaactactttgagtagataaaaacaaaaaaggtatgatgtgttctgtttgacgtgtattctgtttgaggaggacaatcagtaaaaaagataaaatgaagaatttgtttaagagaattttttggagtatggtaaatgttcttcacgttgttataagagaaagaattatgtattgagatccctcaccctgccataaactgttaatattggacaagtcactttacctttttggtcctaagtttcttcctttgtaaaatgaagaggtagtattagattatccctaaggtcttttccagctttccagtgattttttgtataatgaaaactgactaatatgataagtctgagatgccgacagattgagaaataccttctgaaaactcaaggaaaatgatgtaacaaatatttttccttctttctttctttctttctttctttctttctttctttctttctttctttttctttctttctttctttctctctttccctcccttccttccttccttccttccttccttccttccttccttccttcctctttctttgtttctttgtttctttcttttttctttctttctctctgtctctctctctctctcgctctctctctctctttctctcactggagtgcagtggcatgatcatgatcatagctcagtgcaatcttgaactcctgggctcaagccatcctcatgcttttgcctcttgagtagctgggactacaggcacatgccaccaggcctggctgatttctttttttttttttccctgtagagatgaggtctcactttgttgcccagactggttgtgtactcctggcatcaaacatcaaacattcctccctccatttcctcccaaagtgccgagattacaggtgtgagccactgtgcctggctgtgtgtttttttggatatattttattgtcttaattttttaaaaaattgttatttgtgttatatatggtaactccactcacattagccatgtaaaaataccctttttttttctttttttcgagacagggttttgctctgttacccatgttggagtatagtggtgcagttatagctgggttgaagtgatcctcttgcttcagctcccaagtaactaggactacaggcatgcaccaccatgcctggctacattaactatttttactcaataggtttttcttgaagccatcatgattaatgaatgcttatttttaaattttcttaaatcctttagacattagtttattgaagtccttattgtccaagtattcataatcccaggtttttacaggtagagattacagagggaaacaaaagttttcatctctacagtcatttccattcaaacatcccacagctgtagtgtctagccatgtccattgcgtcaaaatctttattggttgctctctagtgacagtatactttaaattgaacataaagcaaaattgtagataatgcaaaattgcaatatttcatgatgtccatgaaagggcctttggtatctaaagtggtttagataccaaagaattaagaggtaactttgtggaaaatttacctttgtttggataagcaaagtcaacttgtgttgattctcctcagaattagcacatggttataataatgacctaaatttgtaaaataaaatgctataagctcttctaaaaataattttcattttgaagttaaagtcccagtcaaaccttcttttcaatacttaactatgaaaatttggtcctgcttttttgttgttgttttgagagagggtccttctctgtcactcacgctgtagtgcaagggtatgatcctggcttactgcaccctctgcctccagggctcaagcagtcctcccacctcagcctcccaagtagctgggaggactacaggcgcacttcatcaagcctggctaattttgtatttttagtggagatggggttttgccatgttgcccaggctggtctcacactcctgggctcaagcagtctgtcctcctcagcctcccaaagtgctgggattacaggtatgaaccactgtgtgtggcctaatggtcctgtttttatatggatgaactaggtggcttttaaaaaaatccagtgccagttatctgtgaatcctaagtattctgtagatttatagccaaagatgagaatggcgaaatttcctgatacacagtactatttttgctgtcaccattagaaagcatttattgaatattcttctttactgtttgtatgtggtgtgttaaattgatgctcttacctttacagcaagggagttggagaaaacagaagaaacactgaaaaaatatcaggattatagacaagcaaagattaagttcacgtaggacatttcttaatttctcaactcaaatttattgtgctacatgaagttctaggttccacaggtgatgtcctttttgtccctggatggctcatatacttaacccaagtcgaagttaaacatttttcatagaattttccacatacaatttgaaaataacataaagctctgtgtgactctatgtaaaactaactgttttatggatgaaataaggtatttggatttatatatttgagggtaaatataagtaacctgttggggaaagcacagggactctgtaagtgtggaagtcaggtttacaggtagtgcgttctttatccattgtgagtttggacatttaacataggtttatgagcaagttctgactctttactctgcataactgattttatttccttttgcacgcagtacatgttttacttagttgtgtccaatcccaaagtcccctcccttttttttaaaaaaactccttaactataagagaaggccagggaatgttcaaaatctaaaatttggactcaagtcgagaacattgataaaacattcattatatttgctggtgggcaagcagaagtcagcctgtaattccaacactttgggaggccacggcaagaggattgcttgaggccaggagttcaagagcagcccccatctctaccagaaaaagtccagaaaacaaaaataaacaagacatgcagcctgtctttaagttaaaaaaaattatttataaaagtaagattttaaaataagcctgccatagtaccgatatgacaaagagtagaaaaaagggaaaaggaaagacacattagaagcagttcactttctttcactggaagaggattttttgactcttaggtggtcagagctgatctcttttgtaggaggtacttttttatgaagggaagcttttttcctgctccttaaagcaaaaataaggaaaattgttactgcctaatttgctgagtatttaaaaacagctccagggtgagtgagaaacgtgtttactgaagttcatggatagtttctgatatgactgatgtggccagtctagttctagaaaatgtttggagactcttgatttaggaggatgattaaaaaccattctttcaggagggtaagtcctcagatgttcttggtgttgtataacttaaaatataatttctggtagttcatgtggccccatttttatgtagtcgtattgctgtgagtcagagttggacaggtagaactgaacttttaaaaatttttacgagttggaaaattcccaggtcctttttaaggtaagtgaggtgggactttgagtttgtgctggctttctactggacttaacttgacaccatcaatctagactctgtataaaatggttcataagaattttgttcactgtagcaatcattttttaaaaaaattaaatgctgaagaaacaaaagatactaatgtggtttgggtgtttgtgccctccaaacctctatttgaaatgtgattcccagtgttggaggtggggtcctgctaggagtaattgaatcatgggggcagatccttcagaatggtttagaaccatctgcttggtgataagtaaggtctcattcagttagttcatgtgagatctggttgtttataagtcagggatccaccccctcttgttcctgctctccccatgtgagacacctgccccccgcttttccttctatcatgattgtaagcctcctgaggccctcatcagaagcacattctaggtctttgcttctacagcctgcagaaccgtgagccaattaaacctctgttctttgtaaattcctcagcctcaggtatttctttatagcagtgtgagaacggcttaataaaaaaactgtgttttacaaaagcatctccaccctccacaattagccagaggcttccttcattaacaaagacccttgttcttacccctcaagaagaaacccaccataaccagcccactgtcacccctaatttgcagacaccaaaacagtcctggaatgctaattacaggaccccccagtcttcctaccctctccaccctcaagaaacccccagtgccttgtatgcaaaaactgattttcagttcaggtgattacagagagtctgtgggcagactttccatcaatttttaaagtattttatgatttcaagggcttgtaagagaagtgattacattttgagaaacagctatgaaaatggatttggatgtgttttcctacatttcttcatgtaattaattcatattctaaccttgctgcttgtaatggtgtgtataggaaatgatacttttactgataggatctctgaatcatttataagtgtttgtattctgctattaaatttcaggacagcattttcttcttaagcagggatcttaataggagagtatctttctggtttttaatttgcttacagaaaatggaatacttacatggggaatttctattctgattagaaattaaaatataaaaaccacataaaacagaccatgaataatctaacatttaatatactacattaatatatatattcaattactgttattagaaagaaagaagtgttgtcctagcctggaaaataatggtaatagatatatacactgagatatttaatatgttcataacttggtatgtatttttttaaaggaaaatattttggttcagttagaactgttagagaagtagtggtagctttttcattcttccgtattgtttcttcacctattaagatatataagtagaaactattattctaactcttgtacgccgcattgatctacaagtgtggctctcaggaattattaacagattggaatccatgggatgcctgagatagagtttagtgtgcaggatattcattgagtaccctttggatcaacatctgtgaaacagaggggaaggaagcaggattggacagagggaaaagttgagttgtgattcggttccagtgacatcctcgactaagtcctcagctggacttcaatttctaggcccttatatagctttgcattggttgtgggctgccctgggaaaggagcataatcttgggcaatctgctcaggcagcctgagtcctccattaaggggaacttggtggtttgtcagaatactctctacaggaatattccattgaatctggtttggtttctttgcttatttttctttctagtttcccttatgcttcagggatcagttatattatttttctttatttttctgtgatcgagagtaagaggctctgatttaactgctttaaagatttactaagtctctaagagttagtacttttagaaattgttttgggatcattatatgtaagataccgcagattttttttttttatgtgtgtgaaactgtatgatagtatggtatttccatatacatagtctcttctctaggtttcttgagataatctgcctcagatggcgtggcagtgtgttaggaaggcaaagagaataaaaattaatatttggcatcagactttcatttatccagtaaatatttatcgagtgcctactatattccaggcaatgttatatagactttggggaaaatagaattttgcagtaagaaaatgagcttgacaagcaggtattgccacaattgaagcattttttccttttatactgagtcttgctctgtcacccaggctggagtgcaatggcacgatcccggctaactgcaacctccacttcccaggtttaagcaatccttccgtctcagcctcccaagtggctgagattataagtgtgcgccaccatgcaaaaattagcccagctgatttttgtattttcagtagagatggggtttcaccatgttggccaggctaatcttgaactcctgatctcaagtgatctgcctgcgtcagtctgccaaagtgttgggattataggtgtgagccactgcctctggcccagttgaagtgtttcaaaagtcctgtagctcatgaagatccgagcctgaaacagtgaagtaagaggatttcttccataatgtagaggagataactatagtgtagagaagttcattagacttctttttacctgaagaaactacttgtgcgtttttaagttaacacctaaatttctaaattacaagttgaataattgcataagatataatttggatgtttggtattgacatttaaaaataaagtggttgcattgctcttttaaatgtatccagtgaaatctaaataccctagcaattggatacttgctttcatctcttttttaaaaaaaaatgctaaggtgcaagatgttggtgttacaaagtactcttaagtttctgatggagaggacactactgtatttcagacttgtggctcctgccaaaaattgacattgttgtgttgcgatgatctaggtcacgttgcatgggttcctgtctgctgctggcatcttgactacattggacctttgactccttgggtctattgatactaccttactgctgttgataccttttcatatcatagtgttgatgtaccagtctgataagccaacttctccacacttgtgaactttgaaactaatttgtgttatgtgttcactcagcttgtgggaccatttgcaccctgatgatggtatgccttctatcccaaaagccactctacagtgggctgttaggcaggatatttagtgggccttcctcattccctaccatcagtggaaatccaatattgttgagtgttggagtggtcacaaaattgactcaaaaaaaaaaaaatttctgaccttctctcatttcctcctggtccttagtaagcagtttggtcccttgaatgtggcctatccccagagagggaacatgtcctatttgctgcttcctggttaatgatcaggatgaaagaccttgggagttacatagatgtattttgaaaattcctgggcatgatgtctttttctttttctttctctcagaggttgccacaggccagcctgctaggtacaccctccaggtggcagcctacctaaaggggtcttaggggattaagaattatttctggctcaacaactcagattcttctgcagggttgacagtcaggtcagaagtatgataaccatttggtgaatatacagataactaagtttccctacagtggtccttatgggtcaagatatgggggtggggaggtataatggttctctggacctttattattattattattattattattattattgttattattattattattattaatgttctcgtttcttttgcagtgactcttccagatgaagggtctgagtctgaggaggagattattatcaacagttacaagtgccttaaatagtccaggcgtggtggctcacacctgtaattccagcactttgggatgtgaggcaggcagattgcttgggctcaggagttcaagactagcctggccaacatggcgaaaccctgtctctacaaaaaataaaaaattagccgggtatggtggtacatacttgtaattctggctactcaggaggctgaggtgggaggatcacctgagccctggaggcagaggttgcagtgagccaagattgtgccactgcactccagcctgggcgatagagccagaccttgtcttaattgaaaaaccaaaaccaaaattcagatgctttaaatttaacatagtgctaagtctcccacccgtttccagatggctcagcccatgttttggttttcattccccataaccaatgatggccccagcactctaaccttccatgcaaaatagctgtcaatatcttcagatgtcttgcccacccccatttttgtagccattgctcagttattccataaagtggctgaatgccaccttgctgttgtgtggacaaacaggagaggtttggctggctgaggtttggctgagtttagaagtagggcaaaatctcaggcccttcatggttgacactgagattatgggtgctgtctctggagtgtccatttgtgggctacatagccccatgtcatgtttcttagacagtttctccaaaaaaacaaggacttaagagactcagttatttgaactaaaataagaatgctaagccacactattctgatggaagaccttgtttgaagtactgtgggcttgtgccctgactgatttatatcttacttgtggagttccaaccattgtaaacaacacttctttccagggcgatctcatgacttcttggtcccttagttcttatatagaagccagacattaatttgcccccttaccagaaacataatgacttgtattgtaagagtgattttaagagacctttaggtatttaaggaaacatcatatagttctcatatgattgctgagatttctccaaaatcaggctaacctagattacttgggggaatttcctggaggggctgactcattcattatttacgtgtaccctgcaggtagtttatctctaggatggagtcatccggttaggataggtattatgaaatcagtccctgacttcagctgaaatgattagtgttaggattttatctctaaaaggtattcaggtcagcatcaagtcactagccagaattgttatgtatgatagaattgcctgggacttcttcatgggccagacagattacaaggtagattctgtgtaattgccaatgcatcttcctatacctggattaatgctttagtttaagtggaaaggtcaacacagaaacatgaggaggaagccagttgaatttctaaggtagactttgatggtttatgggatttgtttagctgattttgtccaagaccctagaggacctagtggaagtcagtactgtagattgacctcaccttgctgctcagagttcctgtttgtagtagccttaattacataattcataaggcaaattaaatacatttggtcctccctttgttggtcagattaatcagcttggttgatagaatggcatacttatagaaaaattgactgggagcctaagacaatgtagaagcaaagggtacatattgttagaaggtgattttccttgggcctcttgcatttccatgttttacaagcagaagcactgactgcctttgttttggactgtcctttcaaggatgcttgtatactaaacagccatggaaagtagacatagtttctccctctggaacaaagggcaggtatgtttactgtgtatatggagagagaatttatctctccagagcaaaagtcagccatacttactgtgcattatagatctgggcttcctaaactcaggcttcctttcctgtaaacgcactgggcatgcagacatccatttgggctcatccgtgttgctgtcatgacagtggggataagggaactgatgcaaatatgctgatatattcttgctgggatgtgactaataaagtcatttgtctctgatctgagtctcctgtcttctaccttcatccttgaaagggtggcaggctaccttgttagtttacaagtagggcaaaatctcaggcccttgacacagttgacactgagattatgggtgctctctctagagtgtccatttgagggcctcgtagccccatgtaataaaagatccatttgagaagtaaataaaaatttcaaaggcatatacccttcagcctagcaatgccatttaaatgtatatgccctctagctgacttaaggagagtcacaagttatcgcccttgagacaaatctggctcactgcttatttcttgtaaatgaagatttgttgtaacatagccgcaccaatatttattggtattgcctatcattgcttttgcactacaaggcacaattgggtagttgcaacagaaccatatgggcaaagccaaaaataattcttaactgttcctttaagaaaaagtttgcagggccctgctttagcatgctagcccaacattgtttactttaaatatatgtgcaaaagtaggtatacaaagtaggtatatcaaaataggcatacaaagatgttcagtgcagaattattggtaatattttttaaaacccaccagttaaactgtaagcaacctcaggagatgtgagaaggtctaattttctttctttttttttttttttttttgcctgaacattgcctcattctttagattttaaaaagtcataccttgcaatgaattcctggtgactctggtatgtggccttacatacttgttctttaaatatacatgtatatttcttcttcttcacccagttttagaaaagaagggattgtcacataatataatctgggaaagaaggcaagggacaccagattattttggtaaacctccatgtatcacaaactccagggagtgtaagaatcacccagtgagggttgaggtgttactgttgaattttacattttagtagaaggatcttggaaagccagtcaaaaagtaatttaggacactaaagtgtcgacctaaaaggaagaagctgaggcaaaattaatgtaagtagagagcgtattggggccaagcttgaggattgcaacctgggagcatagattcaagttgctctgaatatacacattgattagcagcagttacaggtgaatttttagaggcaaaacaggtggactgatacaaagttgttaggaatttttgttagtttacagaaataacattgattagtgattggctatacattgttaagctatgtgtgtggcattaggttaatttatagctacttgttgcaatagcaagcagtttcaacagatgactgcatagctcaagaggcaggaagtaggatgtaattgctgtctcattttaatgcctctctgggcctgatttatttatttatttttatttttatttttttgagatggggcctagctctatcgcccaggctggagtgcagtggcaagatctcggctcaccgcaacatgtgcttctcggggtcaagccagcctctcacctcagtctcctgagtagctgggactacatgcacgtgccagcatgcccatcttgtattttttgccatgttgcccaggctggtcttgaactcctgagctcaagcactccacctgccttggcctcccaaagggctaggattacaggcatgagccactgtgccctagccggggcctgataatttgaaagggctcatattcctcagataaaagttcttttctcaaagtaaaacaaaaacaaaagagagagattgaaacaataataacaaaagttattgctttggatgttgatgagccacgctaactactggttctttttagagtaaggaagaccctctgattctgtgctgagatgtgttgataaaaatctagaatggggtgaaaggcctggactgactaaggcttacgagacaattaaattgactttaaattgaataaatctggtaagaaagtcaagccaaactgtttttggaatttggtagctgttaagaatgagaggagttgataccttggtagaaaagagtttttaggaatcaacctaacaagaaagtaggcaaagttctaatactttggtagccagcactggctaaagtgcaacttgttagcagacaatattgaaggtatttcagaagtattttactcgttgccttttactatcaatgtagtgaccatgtgttttgaacagattagtattatttaattcctttggttagacataggaattaaacttcttttattctcaaagtctcacatacttgtaatctcctgatgggctcttcttacccactgcacagataaacccaattcactgagacagtgttattgcagtaaagaaagagtttaatgcagggctggccaaacagaaggacaagagtttattattactcaaatcagcctccctgggaactcagagggaggctaaggtttttaatgggtaatgtggtggccaggaggatagggaattatcctgttgctgattggttgaggatgaaattataggggtacggaaaaacggtcttcatgtgctgagtccacccacctctgggtggaggccacaggaccggtttgagtcatgagtcacgggtcccagtggagtcagtctgttgtcagaatgaaaaattttgaaaaacatctcaaaagaccagccttaggttctcaatagtgatgttatctataggagcaattggggatgtcacaaatcttgtgacctctggccacatgactccctagaagcaaaagactatagaaactatgcctacattttattagaattcatgcccctcctgtaattctaaccttgtgacctttcattaattttcattccctgagcaaggagggggattagttttagggggggactgttatcatccttgcttccaagttaaactataaactgcatttctcccatggttaacttggcctatatccaggaatgagttagaacagccatcctgtgaggctagaagcaaggtggggtcagccatactagacttctctctcactgtcataatctttgcaaaggcgatttcacatttataaaaacccagtcatgtttaattgtacatatgacaacctcatgaaaaggaagagtatgtaagataggaattacaccagaaaatctaggacatgtgtgccttatttacgtagcatagtcttaacagatgtggttaggggatgagtggtgaacctgctaataattgggataggaacagaagcaaatgtactgagctcatcttgaggtcttcttgcagagcgttcagtacagtgtaatccctgtgtttctatttcttaaagtatagaagtggagaaacagtattttgcatggcaatgttttgcatgtgttagtaggttaacccttttaaaagggtactttattttcatttggaaaaagtgtggaagtagtgagagggacacctattgttatttaacctgttgcctaatttctgtgtattatattttgcttcaaacattaaattttccaagtgttcaagccatcgaaggtagacaagcaatgtagagaaccattatgtcttactcaaagctaatataaccatctactaaatagatggataaggtcgcttgggaaatgtgttcaacgaaataaacatatattgtttaattggtttatttttttatatgggcagttaggtaagcatgttatttcaggtggcatatgtggaagcattttgggactatgtgtaggtgtaacaatgctaagctttcttttagttaatcagggaagacttcatggaagagcatgagtaggtgtgcataagaaactgagggggtatggattatttttgtgaagagcttcaaaaccaaggggaactatatcatatttgaaattaagagtaacaaggtttaattttttattatatgagatagatgaagagggtgagacatatcacctttttttagactttatgtatgttatactaatttcatgtttacttctttccctatatattcttcaattacattaagagcatcttgagagtggaaattatctcttctgtttctttggtgtcccatatagaacaaaattatgaacacgcttacagaaatctcagttaaaaagaagtttaacttttcagatatggaaggtgtgagcatttcttgttagtcattgggcagagtatgggtcaagagaggacatgggaccaagaactggggcagaacgttgatcgtgtttctagcttcgagggccaacctgaggccattgtgtcatgctgaaatgggaaggcatgggtaagctctggagctagcaggttaaactagtgatgggacagaaaacattggcatcgggcgcggtggctcacgcctgtaatcccagcactttgggaggcccaggagggcggatcacaaggtcagaaaacattggcatcaacagtggcttagcatacagatgtgggtcaggattcttgccaatcataaggaaacagtttgagaatgctattcagaatgagctacatgcctcagaatctgtcttaggaaaacaggcttatatagggcagcaccaaggataaaatgttctttacacagaagtgacttgtttggtctttctacgattttaccacagtgactgaaacctaacagataggagttcttatatttaggacagttgactgttgaacaacatgggtttgaactgtatgggtccatttatacttagattttttttttttcaaccaagcgtgaatcgaaaatacagtgttaatgggatgtgaagtctgaatatatatggagggccgacttttcctataggcgggttccacagggacatgagtatgtgctgattttggtatgtgcaggggtctttaatcagtccccggcttgtactgagggatgactgtatactgtatttattttgtgggtttgacctataatggtaggaagtgtgatttcaaatagtttaacttatttttttcttttaatcataaaccctggtgatcaatatttgtcaggcagatcttttcttttttttatgtatgtatgtatgtatgtatgtattatactttaaagttctagggtacatgtgcacaacgtgcaggtttgatacacaggtatacatgtgccatgttggtttgctgcacccctcaactcatcatttatattaagtatttctcttaatgctgtccctcccccagctccccaccccccgataggtcccggtgtgtgatgttccccatcctgtgtccaagtgttctcattgttcatttcccacctatgagtgagaacatgtggtgtttggttttctgtccttgtgatagtttgctgacaatgatggtttccaccttcatccatgtccctgcaaaggacatgaactcatcctttttatggctgcgtagtattccatggtgtatatgtgccacattttcttaatctagtctatcattgatggacatttgggttgattccaagtctttgctattgtgaatagtgctgcagtaaacatacatgtgcatgtgtctttatagcagcatgatttataatcctttgggtatatacccagtaatgggatcactgggtcaaatggtatttctagttctagatccttgtggaatcgccaccactgtcttccacaatggttgagctaatttacactcccaccaacagtgtaaaagtgttcctatttctccacatcctctccagcatctgttgtttcctgactttttaatgattaccattctaattggcgtgagatggtatctcattgtggttttgattttcatttctctgatgaccagtgatgatgagcattttttcacgtggtcagacagatcttttcttgttgggccatgtgactagtagaaggaaatagtcataccctaatttaatgagatttctgaattgaaaggagaacaggttactatttctagcttacacaggtgggagttgaataatgtacacagctccaggtggttttccttctcttttaagtgcattgaggctcttcctgtttctgttgtataagagacattaaatgtcataatttgctgttcaggaattttaaatttttgttttggttgacatactaaaagtttagctggggttataagaaataatcctagacaacatctccagtttttacctcaagcagattatttgaacaacattcacttgtttcatagagattattttttaagtatggagtttgattttattcagtgcttgtttagagtatttattgagcacttgatatgtgccaaatacttgtaggtactttatgtcttttatttaatcctcatgggaacttcaaaagaaaggaagtggtattttcagttttaaaaggtgaggacattgaaactctctttaccaaacagagtaaccacccctccccattctgcttgaaaaatacaccaattgatgatcacaacttactgatcattgtatctggtcagttatattctagtttactttcatacttctgcaccaaccatatgagttgtacccttaccaagagccaattatattggttcccaaacctcttaataattatttatttaaaattaagcagattggattcataaagaagttttttttatgaaaaccgagggaatgtttggaaagactcaaacacagggaggtacaaaacttgctattgaattaggtgtaaataagaaaacaataaattggagaaaaaacaaatctgtgtgattctgaatttatttctttgcaaatacattagtttttgttatagtttaaaggtgccaacctttttggcaccaggaactggttttgtggaagacacttttctgtggatggtgagggttgtaggggatagttttgggacataagtattccacctcagatcatcaggcattagattctcataaggatcgtgcaacctaaatcccttgcatagttcacaacagggttcatgtgcctatgaaaatctaatgtgaccactgatctgacaggaggtggagctcaggccttaatgctctctacccactgcttacctcctactgtggagcctggttcctaataggccacatattggtagtaatctgttgcccaggggttgtggacccctgctttaaagaagcaagacaaataactgtgaacaatgtgttaggagtatggctcaggcaagaaaggcaaagtgcaaaactaatctgaggacccatactcaaaaaagtgtcttttttttttttttttttttttttgagacggagtctcgctctgtctcctaggttagagtgaggtagtgcgatctcggctcactgcagcttctgctaggattcaagctattctcctgccttctgagtagttgagattacaggcgcccgccaccaaacccaactaatttctgtattttcagtagagatgtggtttcaccatgttggctaggctggtcttgaactcctgactgcaagtcatctgcctgcctcagcctcccaaagtgctgggatttcaggcatgagccactgcacccaacccaaaaaaggttcttgatcctgagtttggaaccaaatgaaaaataagatacaagagagtaacatagtaagactggaatgtcagctttattaatgataagatgatcagaattcatggctttagagctgctgccaaaggagcttgccggtactgcaaagaaaatacccagaatttctgacttagaccattccatagtaagaagaatagtgccaatcagtaattggaagaatagtgccaatcagtaatattggcagctttttattacattagctccacatataaaagaaccatgcacattcgtcaacaagctcacttccctttgggataaggtaggtaagggagaggaacgaattcttcaagctagaaggctgaggttaggaaaaggtaaatcctacattaaaatgttgggttatgttttatgtttaaaggtagtcaaggtaatatctggcttattcattgtatttttaatctgcttttgaaattatgaaaatgtgttgcatagctatgatggaacagcacctaaattcaaatctagtcctatgtgatttataagtttgtgtccccgctacctttttttttttgagaccaaggctcagctcgctctgtcgcccaggctggagtgcagtggcacgatcgcagctcattgcagcctctgcctcctgggttaaagctgttcttttgcctcagcctccctagtaactgggactacaggcgcctgctaccatgtgcggctaatttttgtattttcagtagagaggaggtttcaccatgttggccacgctggtctcgaattcctgacctcaagtgatcgcctgcctcagccttgcaaaagtgctgggattacaggcatgagccaccgcccccagcctgtgcccttttcactaaaatcacatttattgaggtttctttggggcactcctgcttgcgttttcacatttcttatctatgcacctgaattttccctttggaattttgaccacagaacctgttttgtttcagttagaataatcctcagtctggaaatcatgtattaaatgacacaatgggatggaattgtagcctataataagtgaagagaaagagaagattaccacctaagagctttaaatacttgaaatgcgcctggtctccagatgcagagaagttgtgttgaaagaatttgtatgatagctcctcatacagtgtttttatttataaaagtaattcatgtacatcagtttacaaaataaaagttcttacgtaagaaatgttagtcaccagtgtgatgaaacgtagaatgaaaccttaaactgtgttaatagaaatgtggtgtcagaatcatagatggtagtggttcctttgtaatcttcgctgagatgatgaattcattttcatactttaagagggtcactcgtcaactgtagtgacttagaaaggcatgtttaggatttgagctactgaaaatgttcttgtaggaacagttaaaaaactgggaatgggaagactgagaatgtacaggaataatactctccagagttttaaatgctgtcatgtagaagataatatagatttctctggtgttcctctagaacagagataggaaaattctttttggaaaggaccaggtaaacattgtgggctttgtgtcaccacttaactctgcagttgtaacatgaaagcaagcagccatagacaatatatggtaaacaaatgggaatggctgtattccaacaaaaccttatttgtaaaaacagatagtgggctggatttcaccagccaatagtgtgccaaactcttctctgaaagagcatcatttccatgtcaggttaaaagtttagcttaagaatttaagagaactttcaagagaatatgggtttcagcagtgaaaaagactgtcttgagaggcctagtgtcctgttactgatttattataagcagcagtccagcatgctgttggtaggactcttgtagaagagaggaccagaggaatcctgacttctgccaacttttctccacaaattgtctgtgcttctcggataaaaattttctgatttagtcgttaatatttacagtttaagggaaaaacattcaactcagtaaataagtctgtattaaactttgctttgtatgactctgcttattttttagtttcattgtattttatccagtacagtatttcattttatatattttaatttacgtatacattttacataatatgtattttattgtgtatatgtaaatattgtatatataacatacatacagtcatttcttgatgtccgtgggggattggttccaggacccctgcaggtaacaaaatttgtggatgctgaaggcctttatataaaatggcgtagtatttgcatataacctgtgcacatcctcctatacaatttaaatcatttctagattacatataatacctaataccatgtagatgctatgtaaatagttgttatactgtatttttaaatttgtattattttttattttatttgtattggtttttattttgttgtatttttttttcccaaatgttttcgaactgaggttgaatgaatctgcagatacagaaactgaagatacctagggctgactgtatatacaataaaacatacacattttaatgtatgataagattagttttgagatctgttttgatagatgtatatactctaatcaagatagggaccatgtccatcactccagaaagtaccccctttcagttagttttcttcaacacctatgtcttggaacgggtcatcagatttctgtcactgtaaattacctttggcctgttgtagaaataactacataataatgaaattgtacaggataaactcttgtatctggcttctttgactcagaatgttttcaagatttatccaagttgttgcatgcatcagaaattagttatcttagtgaataatagttttccacgtgccagtgctgatttggccattcgttcgttgatgtatatttggaccttttagagtttttaagctattatgaataaatctgttgtgaaattctctataaggttttttatggtcatttttttttcttggatacatactgagtagaggaattgccaggtcacattgttaactgtatggttaatactctgagagagtggaaaagtgcttttttaaagtgatcgtaccactttacagtcccacattgatatggtttggccgtgtccccacccaaatctcatcttgaactgtagctcccataatccccatgtgtctcaggattccccacgtgaatcatgggggtgaattttcccttactgttctcatgatagtaaatgtctcatgagatctgatggttttataaagggcagttcccctgcacacgctctcttgcctgccgccatgcaagactttgcctttgtctcttcttcaccttctgccatgattgtgacacctccctaggcatgtggaactgtgagtccattaaacctatgtttcttttttttttcttttgagatggagtctcactctgttgcccaggctggagtgtggtggtgtggtcttggctcactgcaacctctgtctcctgggttcaagttattcttctgcctcagcctcctgagtagctgggaacacaggcacgcatcaccacacccagctagtttttgtatttttagtaagtagagacggggtttcgccatgttgggcaggctggtcttgaactcctgacctcaggtgatctgcccgctttggcctctcaaagattataggtgtgagccaccgcgcccgactgaaacctctttttctttataaattacccagtctcgggtatttcttcatagccttatgaaaatgtactaataaacacatgtaacacattattgttgcagttgctcaacattctctatcacacttggtattgtcagtcattttaagttttgttattcatgtggtagtatctcattatggttttagtttgcatttccctgatgtttgacgatgttggacattttttcatgtgcttattgttcatgtatgtatcttcttttgcccgtttttaaatcaagttgccagctttttgttaaatttaaagggcacctcataattttggatataaaatcttttgtcagttatacgtaatatgaatattttctcccagccttttcattgtctgaatagtcttttgaggggcattaggattttattttgataggatcatttaccaaagctttcattgtcttgtctaaaaaacatctttgcttactgcaaaattgtgaagaatttttcttgttttcttcagaagttttgtggttttagattttatatgtagtccttttttttttctttttggaggcagtctcactgtgtcgcccaggctgaggtgcagtaatgcgatcttggctcactgcaccttctccctcccggttcaagcgattctcctgcatcagcttcctgagtagctggaattacaggtgtgcgccaccatgcccagctaattttttatatttttagtagagacggggttttaccatgttggccaggctggtcttgaactcctggcctcaagtgctctcgaacgacctggcctcccatagtgctaggatacaggcatgaaccaccccacctgtctttacatgtatcataagcatttcaaattaattttcgtttacattgtgaaagagtggttcttccagtgtgaaagagtggttcttccactacataattggttgttccagcaccacttgtttgagactatcatgtcttcattgaatttttttttttggtgccttagttgaaaatcatttgaccacatgtatttgattctatttctgtactctctattcttgtattaatcattatgtctattgtaatttatgcctacctgactttgtttttctttttaaaaattatgttgcctattctgagccttcgtacttccatatgcactttagaatcagcttgcagtttcattttagaaaggcttgctagaattttgattggaattacatcgattatttgttttattttttactattcctccaccttattacttggagaaaagtatactttgtactacgctatatgggttgttcagttgtgttgtttttaagttttatatttaaaaattaacatggagtaaaatggacttttttggtgtataagtcaataaactttgacatgtgtagctctgtgtaacgcataccacggtcaagatatatatagttctgttaccctataaaccatgttcaagctgttactttccccttttctcacctcttaatccctggcagccattgatctgttctctgttactgtagttttatcttgttggagactgcgtataaatgtaataatacaatgcagtatgtaatgttttgacactggcttctttcactaagcataattacatgtgagattcaactatgttgtaggtatcagtagtttcttttcttttattgctgagtggtgttacgttatatggatgtaccatagtttgttttttcatgttaaaggacatttgtgttttttatagtttttggagataagagtagagtcgctatgaacatttttgtgcatgtttttgtatgaacataagttttcatttctagttttcatttcaaatctcacctgggaataagattactgggtcatgtgataatttgtagagtttgctttattgattaattaattgattaatcagttgattaattgagtcgtggtcttgctctgtcactgaggcaggagtttgctttattgattgattaattgattaatcaattgattaattgaatcatggtcttgcgctgtcactgaggcaggagtgcagtggcatgatgatagctcactgcagcctgaaactcctgagctcaactgattctcccaccccagcctcctgagtagctgggaccacaggtgcaagccagcacacctggctaacctggctaactttatttatttttttgtagaaaatgggatcttgctgtgttgcccaggctgttctcaaattcctgcctcagcctctcaaaatgctgggattataggaaagagccactgtacctggccttttttatttttaataaatatttgtttcttattttgaaagtaatcacgttcattagaaagattttggatatgtggacataattgaaaaataggaaaactatcgcccattgtctttctgctgaaactcaaacactatagaaatttcagtttgtttccatttcttcctcttctcttctttttctgttttcaatcattttgaaaatataatttaatttccatctttatcttaattgcatattcatatataagattcagttcttagtaacttgctgattagtatgtgacacattatcttccatgtgtataaccacaattcacatttgtagaagtgagttactgtagtgggattttagacagtgtaactggctcatatgagatagttttgactgaccaagctttatttattcatcaaatccaaccaattgcctatctcaaggattatatagttgatgccaaccacttgacttgccattcagactgaataaagcctacatacttgtcattttttattgtgtgaattattatttctgtagtaacttgtcttctaaagtaagaataatgtttgtattctcaaaaggaatagggtgcaaatatttccacatagttttagaaatcagatgctgctctctctatatttttctgcctcttacctttatttttaagtgttgtgggctactcctgttttcagaatgttggctcctgtcaagtgattgctaagggctagatgtggccttgtggaacttggataaacattttcttctctgcatttggttgaagtgtttatcagtgatctccctgtcttctttgtggccaggagcttggctaaaaggattgtttagcttgaggtttggggggtcagatcaatcttctgaggctttctgacctggcttatcgctgtggttggatattagacagtatcattaagctaataatcagaccctataactcagaatttagacatgaagaaattcagcttcttttacttatttaaaagaggataatattctccggttctgggtaatatggagtgaacacacagcactctttctttagaattgaatttaattataaaatctggacagaatacatggtcaccagctgcaggcagatagagaaagaacatcagatttcaaaataccagcaaacctccatgatccatttcagtacagccagaaacctagaagtgaacactgcagaaaaacagccagatccagaagctctctaactctggcttgagctgtgagaaaggatgaaaagcttagagagagttgaggtcatcccttgttattttttctttttccttttcccctattttcttacaacttagtcccaggcaatcacatggtaatgacatcagctgacagccgttgcatgcaggaaccaaaactctgagggggagggtaccttcagctctgtttgatggaactgtagttccaagaggcagagccaaagcccattgcattttttactctatcctctcaatgtttttcaccaaaccaaggcagttgtaaaagtgacctctttcgggcaggaggacagaaaaagatatcctcaggaaattggaaaagagaggaaagagcttgggaaagagacctcgtgaagtcgtatacagacaccttgggctcatgaatctgatcttaattagcatattttaaaaagactttaaaaacaggtatgagatagaactccaccaggttgtagacttaccattggatggcacacccacaggaataatccaaatagtgctgcaaaggctttgaaaactgaactgacattggaactgcaatctacagagggcatattggaacttgcagactgaccttaaacaggttgattgtctgctaaaacaaaaatataaatataccttataggatttaagaatattctgagttttttgtgtcgtttcggctttttgaggcagggtcttaactctttcatacaggctggagtgcgctggcacaatcagggctcgcagcagcctggacctcccatgctcaagtgatcctcctgcctcagcctccagagtagctgggactacaggcatatgggactacaggcatatgccaccatgcctggctaattttaaaattttttgtagagaggaggtctcactatgttgcccaggctggtcttgaaatcctgggctcaagtgattctcccacctaggcctccaagagtgccgtgattacaggcatgagccactgcctctggctgatccttagttttatagcacattattcagaatgtcaaggatataatccaaagttacttgatatacaaaaggccataagtaattcacactggtaaaggcaataacagacaccagtgacaagataatattaatgttggaattatttgacaaagacattaaaccctccattatgaaaatgcttgcataagcaactgtgaacatttctgcaacaaatgttacactaaagtatcaacaaagaagtaaaaggtaaagaggaaacaaaattttagaactaaaagagcaataactataacttaaaaagctgcggatggactcaataacagaatggagatgaaagaggaaagagtgaataaagataggtcaatagaaatttttcaatctgaacaataaagagaaaaatgaaaaaaactttagagcttcagagaactgtggactggtaacattaggactaaaacttatgtcattgaatttccagaaggaaaaatagtgtgatgcaaaaaatatatatatatttgaagaaataattgctgaaaactatgattgtgttaaaagtcatagatgtatacattaaagtgaaaaaagtcaattttaccacatgagaatttaaaaaataattttaaagaggagctgctattatattcagacagtaacatggaatttttattttacagtagttaaatcctgatcttgtgactttgggaattattgatttcacagttagtaatggcaaatgttttccccacattattgtctgaactgaatcgaaacttggtgtgagtagtggtggcaagatactgactttttttttagagcaattcttggtatgtacaacagtttggcttattatggctcttattttctaagctgtagaaatgttctacttgtgaggtactgcagggacatgaacagccctgagaaagaaagtaggttcttacttatttttctacgtatagaattttatgatatattagtaaaaattattagctttcttgcttatttaattctaaagatgtaccattaactaaaacccttcaatttcacagctccgtagacatttggtagggattatacaggtccaaaaggaaagtaaacaccagagtagctattacaagggaacacaaataagaatggtttagaaatggatatgatgaattgacatgtaagggtccatgtaaatgctgtttgctctctaaaagaatgtttacctaaagctattcatcctgcagacttgtttaatggtatcctggtgatgaaattgagacataagtaatatacagttcagtttagttttgttagtgagctactttaaatctttgatcaccacattggtttttatagtacctgtttggatttggatacagtttaacacttcattaagcaaatggcttctctttccttaggtgtgcttggataacctaattgatgtatataggactgatcacattttcagattttacttgagtcactgagattatttttgttgttgtttttgggttaaataaactattatattgtgaatggaagaatctttaggttcttgcttttcttgttgatgacttttttttcttccttttgccctatgttttttcactacgcttgaccacttctgggtgggcaagaagagcttgccctttatttagtcgagtttgtagctgtactcaataaaatttgccacctgtgaaagggattgcagtgttggagaaacaaaggaaattaataatgtttgattttaagatcatttatggtttcatatgttcagccttgtgtcttatggttgtgaacaggttcataaattatgacaatgaatttaacatttaatagaatatattttttaatgatacacacatatatgtagatgtataaagatatgtatgtagttttaaaagtactctcatatctgtatacttttcatttcatactcatgatacagtgaatttaatagtggtattgtctctattttacatatgaaggaccagtacctaattataatgacttcccaaaaccgtatagttaataagcagtataatagtgatttaaacccagaactaggacactgtctccctggtcagtgttatttccatttcacaatactgcctttaacaaaacagtgagaaataatctgtaagctttactatttgaacaggcagtgttgtcatttaaaattctgtttgctgtgattctccaatttttttaggaacatataatttcccattttctgggtgccataggaaataatatcaacataaaatattttcctcaacatgtaagtttccagatcactgcgcatatattagaaactaatgttaataatattaacattttcttaatacttttatgtgtatttaacatgaattcttttattcttacaaccccccaatgagattggtacagttaccttaattaccagatgaagaaacagtcttgggaatcagtaatttgtacaaagttacacacagtgaatgacttcggggtttaaacttccaaagtgattaaatgatattgtttcctgaaagagtaatgttatcttattttattttagagatagtgtcttgctctgtcacccattctggagtgcagtggcacgatcatagctcactgcagccttgaactcctgggctcaagcaattcttttgcatcagcctctcaagaagctagaactacaggtatgcaccaccatgcctggctaattttttaaaatttttttgtagagacgggatctcactatgttgtgtaggctgattgccaactccaggcctcaagtgatcctcccacctcggcctcccaaagtattgggattgtaggtgtgagccactagtgcccagcctctgaaacaataattttattcaaataagagcatgaaaagtgtttgtagtcttgtcacaaggtgcttttaatggactttgaagggtggtttaggcaagttaaaattttttctttgtttatatttttggggaaaaaaacaccaaaagcctggcctgtcaggattagaagactcttaactgaggtcttatggaattagaaaagtggatcaggatcagattgtgagaagccttgactcaggggtccccaaacccctgggcacagactgggaaacccggttgcaccgcaggaggtgagtggcaagcaaacaaacattatctcctgagctccacctcccagatcagcagcggcattagattctcataggaaccaaaccctattgtgaactgtacgtgtggggggatctagattgctcactccttatgaaaatctaactaatgcctgatgatccgaagtggaacagttttatcccaaaaccatcccaccccccacccccagctcctggtgccagaagggttggagactgctgccttgactgacacattgaatagttttgggctttgagaggttcttgaaagattttgaacggtggctgttcaaagcattttggttttccctaaatgtggtgtggaattagttgaacagcacaccagtgaagacggtaatgaaggcatcttgatatagataaaggttttttgtttttttttcactgaagaagtcataggaatggaataaaagagttggagaagagatattttaaaggggaggttgactgcgtttgtaatctggcatttctctttggtaggtacctagaagtaaaattgccaggtcatgtaataactctaagattttgagaaactgccagactgttttccagagtagctgcaccattttacattcccagcagtagcatatgagggttctaattttccaaatccttggcagcacttgtttttatctctttaattatagcctgcctagtagttgtgaaatggtatctcattgtggttttgatttgcatttccttagtggctgctaatggtgttgaacgtctattttatgtgcttattggctgtttgcttattttctttggagaactattttgtttatttgcccattttttaattgaaaatttaaaaaaattactgagttatatttctttataaaatattctaaatacaaattccttatgtaattctgtagattcttttaggtttcttttcattttcatgatgtcctgttttccctttttaaaaaaattattgcttgtgtttttggtatcatctctcagaaggacttttaagggaagcagagaaaagagagaagcaaatcctatattgttttcctctgtgtagaagtttttgaacatttccttatagtaagtcaaaggattgggacagctgcacataactagcatgttgggatgatgtggttatttcaattaagtgaagaagtcagttgtttttaactggacaagcaggtaagtgatttaaagtgtaatcattttcttatgttgattgttgtgaggtgataaaatctggtaagaaaattaaggtggtttgaaaaatgacatcctgtgcagatttaaaaagtagtataaggggctcgagcacggtggctcatacctgtaatcccagcactttgggaggccaaggcgagcggatcacctgaggtcaggagttcgagattagcctggacaacatggtgaaaccccatctttactaaaaattagctgggtgtggttcctcacgcctgtaatcccagcaacttgggaggctgaggcaggagaatcgcttgaacccaggaggcagaggttacagtgagccgagatcgtgccattgccttccagcctgggtgacaagagctcaaaaaaacaaacaaacaaacaaacaaacaaggtagtataagctacctaactgtaggatgaagtaagtgcacagtagaagatcaagagctctagtgagaatagaggataaggagataaagaagccattctgggttgtcctcttgtattgtcttgggtcttggtagcaattttgactgctttggaaaattgttcggtttcttatgagcatatgttccgtttctttgattctctgatgctgtaacaagtacccttgctttttaatggacaaattaactgaagggtagtatcaattttagtactgatttccgtttcctttttcattcttatgaatatgtagttgatctttctcacacacatgtacttacacatgtggtttaattagatgtggcaaaaaaccagtgttcctttttcaggaaggactttatttctattgctagtgctaaaacacatacgtttattgaaccaaatcataggatattatcacgttcagcactgtaaagtgaaataagctatcttaaaaacagcttgatggatttctaggggtaaggagttttaattacaaaatgaaataggttttaaactaatattcataagagttcaaggaaaaacaaaattaagtggaaaaattcctgttctaattttattagaaaggaattaatagctatttattcacaacatctgattaggaagctgggatagggcaagctctcaataatagaaaagtgtggggcaggcgtggcggctcatgcctagcacattgggaggctgaggtaggaggattacttgaggccaggagtttgagaccaacctgggcaacatagtgagatcccatctctgttaaaaaaaaaattgctggacatgagggtgcctgcctgtggtccaagctactcagggggctgagacagggggattgcttgagcccaggagttggaggttgcagtgagccatgaccataccacttgcactccagctgggtgacagagagcccatctcaaaaagaaagaaggtgggggtggtggagagaaggaagagagggagggagggagggagggaaagaaaagaaaaaaatatctgggtactatttcgtgatatcacagattgagtctttggcttcagagttctagaggtgattcaccagcctgaaaatacgcttttcataccttcgcattcttgccaaagcatgtccttcatttaattaggagaggataataaaatgtaacttgtaaggtgaaaaaaaaagaagcgacaagccatagagtttatctaaaaattttttgtcctaagcatttttgttatatttagtaggaaactgctactttgggaacaggagaagggaatattggggagatctgcatttttctttagctagtccttgttccaagtatattgtagacatagaggtaaacattagcgttgtattgaagtgcagtggttccttgggtatatgcaaatatatgtacattatttgtactgtagttagctgaggggacacgggatagatagatgactaggcctttgatgtttttttccttgtgtgaatgaggaaaaatgaaaaggtactccaaatgctgtgatttttgtggtatgtgcctagctcttaattgtcaaatgatactttccccttaactgtataggccagactgcttggtgtatctccattccgtaccattaattcacaaaaacttagaaagtattcttccacttgttacctttttgatttgattaatttgtttaaaggtacattgaaggctgtcttctgttgtataagggttgagtgaacacatccatgttcacttttctgtgtaattgatgccgtaattgagaggtcattacctgatgtctaaataaatagacatgggttgttttttcttacatatctgttcatattgaaactcatctcctgctttaccctatttctgaggctccgtgaaatatttcaacctcagtcttcgcattttgttagccagttacttcattgtcatttgtatacccaggtatttaacttggtttcccattcaggctatttatattttctgaccatttgtggaattcaattcatacctctccatctacttcagcaaatgttttctggtcactggttttgtttctctgtcagacccttccttacccatgaccaaaaaaaatccttaattttatcatagcttcagcttttgtttttattgttgctttgaatagtccatgtggtagaatctttttaccctcagcccccaaaataaactttgtttcctgtctctctgtgggttatgcttacttattaagtccgtagaccttcttgttgcagactggcttttcaggaatcatgagacccatttatttgtacagttttgggtttcttctggacctcctaaaggacaagaagagttactagtaatattcctgccctctgacacagtaactaccacttaggtgccacagctctttgagattgtcagaagtcatgattgcctgtcatccagacctagtaatttctttatattaatataactgtattactctttgatctaatattctaacttctgcttcaaaaattatttcaggcctctcttgattagcttttccagacttcatgagtctctcttttatctcactttctttcctgaataagaacttttattattggctttttgagtaacttgtaaataatattcaaactcctcttcaggatttttatttctttcttttgaaaaagtatcttctgtctgtgaaaacatgattatatggattcttttttatctccccattgtagagtacattcttaatgcaacaaaagagcaaagattctgaaccattaatttatcgttcaatctagattcctgattttgtttataacgtgggctgtatatttgtggagcctatcttgacatcatgatggctttttatcctttaattatatttggtaaaaagtaaattgatcttattccatttgtcttcaccagtggattcagtatcggaagaaagctctttggcaagtgcataacctgactgaaatgtcagggaacagatggaaaggagttccgtaagaattggctgaatagtaggagtttgactttctgaaaagtttactgcctttcctttcctccagaagtgatgggaggaagagctcaaccttcaaacgaagagacagctgtttttaggctggtattcagtaggagaagataaaagcagtttcaaataggtctttaccctatggtttatttatttttgaagagacatgagctctcagaatatcgagaatatctcatgatcagatgtaaacacaaaaaacagtttcgagccaatataaatagttcttttgaattttcctaattatactactgccttggttagggtgaaaaattgcatttagggtaattaacttactcataatatggatgtgaaggcaactgactttatttgtgattatatagttgggtgttgtgaatgttattatagtcaaaatttctgcttaagtgcatataggctatttttgtacattttaacatttcctcatagtgttctgaagaccacactgaaaaaaatcccttttaaattactgattttcattacctgattaacttatgtgaatctatgatgaggctctcaggtattaactttaacaaattaagctatcatgtttataatcacatgaagaatttgaggcaggatgtcctacctgacatcaggtacttcttctacatttgataaaacgaaaaatgcattggaagacagatgcagtactttggaagacagacagaaaagtacaataaagattaaaagaaagatgggcaatttggcagtcaaacaaatttagctctgagtgctggggtctcttttctaattactcagcttttagtacgttaaaattggatgttaatctcatgatgaatcttttctttatactattgaaccaaatagttctttctcttatttattttttatgttgtcttcaggtggataaattaggtgttatgtctatgtttttccctttgtattcacataagtataatttgcaaaaaagcctttgccacagtgggaattcattgtggtgatgaaagctaaagtgttctttcatgctaattttataatgtgtatatactgcagaagttagacaaagaaactaagttaaacaaagatctagagccactgccaaacctgaaaacaacaatggcacaaagaagagaacagaatgcagggtccaaagccaacaaaatccaaatgtaaatttgctagtttgcaggcatctcatgtaaatgggcttattttggcaactcttggagttaaaaatacaaaagacatcacttatacaaaagcaaaaataattgagatttaaaaaaaaataggaaaatggtctttggaaatttatagtagccacttagtttgtatgaagaatgctgcctttcacttttgttaaaatccatttgtttacttgatcgcattactagtgtactgtggctcttcatatttatgaaagtcattttggatgacagaagaagacatgatcattacatcaaaagtttactgaacacgttttttccctaagccttggattgggacctgtaattacaatcctttcttggtatgttggcaacatattttatattaatataattgccattttctagccattgcctgcatgcccatttactcaatttaactacaaaagtaccttttaccttattttatttttcaatttttattgttttttttgagatggagttttgccttgttgcccaggctggagtgcagtggcacgatctcagctcactgcaacctctgcctcatatgggagggcataaagtgaatccttagcaagtgtgggtctggctcatttgtggttcatcagatggacgtggacgaagggaaacaaaagtagtaatgtttctttgaagataaaggatcgaaaacagagtgttcttatggaaataaaaagataatggctaaagaaatgggcatcactttttggtatatgcaaaaaaacgtgattttcctgctctaatatatatagacaaagtcttaactctgttgcccaggctgaaatgtgtgccacagtcattgctcactgtgacctcaaattccggggctgaattgatcatcctgcctctgcctcccgaggagccagtactacaggcacgcaccaccattcctggctaatttttaatttttttgtggagacgggatcgcactgtgttgcccaagctggtctcgaagtcttggcttcaagtgaccctcctgcctctgtctcccaaagtgctgggattacaaatgtgagccactgtgcccagccttacatataaatattttttcttatgaatttttaggtctacttttttgttttttattgtggttaaaaaaatgagatctgtcttcttaacaaattcttaagtatttagtatggtattgttaactatgtgcacattgttttacagcagatctttagtactttttcatcttgcatgactgaaactctgtccctattgaataacagttccccactctacagtaatcaccattctaccttctgcttctgagtttcgctactttagatacttcatataagtggaattatgcagtatttgtccttttgtgactggcttactttattaacatgtcatcctgcaggttcattcatgttatcacaagtgatagaattttttctttcttttaaggctaaataatattttattgcacgtgtgtaccacattttctttatttttttcatctaaagacccactaaaactacatggattaactacattaatccatcggtagacatttaggttatttctacattttggctattcatatttcaataaacatgggaatacagatacctttttgagatcctgattttaactcttttggataagtatccagaagtgggattgctggatcattatggtagttctatttttaattttttaaggacctgccatactattttccatggcaaccgtatcattttatattccctctaacagtgcttccagtctctccacgtcctcactatcacttatgttcttatgttgtgtgtgtgtgttttttaataatagtcatcctaatgggtgtgaggatatgtatcagtctcactgtggttttgatttgcatttccctgatgatcagatatgttgagcacatttttatgtacctataaaaatatacaaagaagacacctgtatgtcttcttcggagaaattgggtattcttaattgatttaaaacaatatttaagtcagtagaattttagcaaagtaaaagatactgaatttctggaagtctttgtgattgtgtttgaattctatgaagtgttaggctagtagttttgtatttgtccattgattgtttttggtttaagttatttcttcaagaaaactcatttttaacttataaacttcagaaattttggaagatagtgaaaggaagaaaaaattcaactttgcaaatgaaattattattagttttctagttcccttcagttttccccgtcatgcattgtttttaaagttaccatattaaacttttttttttatcttgcttttttaccgaaaactatgatggaaagaaagttttaattaaaaaaagcttaacagataaaagagaaaaagtagtacagtttttacattcagattggacactttcaaattggaaacaagaagaaacagtttttgaattaaatgggaaagtgaaataaacaaggataaataggagctaatactgtattactgaatttatatactcttagaaacatggacagagtcagaacacatagtaaatttatatgataatgagccacatgactctaatataagctctgctatttgagttttaaatgtttcactgtttaagaatttaccagccgggcacagtgggtcacacctgtaatcccagcactttgggaggccgagacaggcggatcacttgaggtcaggagtttgagataagactggccaacatgatgaaaccccgtctcttaaaaaaaaaatttacctgtggattctttaagtgaagttacttatattgtcatttaattactagtttttaaaatgaactttttgtttgttagagaaatttacagggcatatattctacctgttgaatgaatcatcatgctcagagagagttccagttttgtgactgatttgccttaccattttttttcttttctaactattgtaatttttttttcagccttgcttttacctgtttttctggtcaaaattttatggatcttttctttgaagtagagcttttcatgctgactttagtcatgtgatttttcaggtaattttttttttataagactgtgtttaggatgacatattctgcttagtaagaattcattattttcaaatgttcacggatttgttatgttttccatacaaatacatgttttgaggttagtggacataaagtggaatggggcattttgggagaaaacctctgttttattgagtttaacttgcttgatcatttgtggtactgatgaacctaccatacaaaaagcagtgaagataaacttgggggtgtaaatgacaaagcatccagaatcatagtagattttcactaaatgcttattgagtagaaattattcagtagtggaaagcagatataattgatcattgtagaaaacagtaacattttctgtcacgtgttaatcttttaaaacaactcagtgaaacagtgcagggagaccgttttgtgatggtgattatagacacttagaaatgactccatgtgagatgtgttccagacacattacatgctgtcccatttaagtaggcagaacctatgtttccttttcacaaaaggaactggggcaaaaaagtgtgtggcattcaagacaaacgatttgaactatgtctggattaatacgtcaaattctttttttccccataagatgaatactgtttcttttttattgtctaggtttttattctcatgaaagtaggaaaagagttgatttgtgataaacatgagtatctttgtgcagcctgactgactttaaagagcagtgggatcaggattgtgtcagtattacactctgtggtaatatcttctgtatcacttgctataataagtcattcatgttgaggatttttttttatttgtttgcgttattgttttagtttttgtgttttgagataggatctccctctgtaacccaggctgcagtacaatggcataatcatggctcactgcagcttctacctcctgggctcaagcgatcctcccacctcaacctcccaagtatgtaggactacaggcacataccatcatgcctggataatttttgtattttttgtagagacggggtttcactgtgtttcccaggctgttctcaaactcctggacccaagcgatgtgccctccttgccctcccaaagtgctgggattacagacctgagccactgtgcctagccatgtggagaagttttagtacagaggctattagctccggcaggctgtcagtactccagtcagagagaaactgatactttaagaggcaataccacaaatgggaaatccaacttagacccagcaacttcataagcagcagatgactgccttccacgattttcttcactgaaaaattgccaaatgagttctctaacaataggaatgaaaaacctttccttacagtttcagatcgtttacatttgttgagaatttaactgtgtgacagagactgtacttaaacgccttaccaacatcatctcatttaattctcagcctcactcttgagttatgtactattatcaacccacatttaacagaggaagaagcagacttagatagggtcatcacatagctagcaaatatcaaaacttggcatcatacctggatctagctaattctaaagcatgttttcttgagtttgtcaccttacatagttactacagagttcactatattctactttctttgttgacttgaagagaaactcagacactagtttgagaaattgggtatggaaggacatcagttagattcatttttttctgacattgtttttgtttgtttgtttgtttgtttttgagatggagtctcactctgttgcccaggctggagtgcagtggtatgatctccgctcactgcaacctctgcctcccaggttcaagctgttctcctgcctcagcttcctgagtagctgggactacaggccagtgccatcacacccacttaatttttgtatgttttttgatttttttttagcagagatgggtttcaccatgttggccaggctgttctcgaactcctgacctcaagtgatccacctgccttggcctccccaagtgctgggattacaggcgtgagccaccatacctggctgatattctaaaactattggaatacatatattaaatgttcttaatctctcaagtttccttcacactatcgataaatatcttcctctgactaaaggcacaccaagggagaaacagtatttccccttcttccctcctgaggcagctctgaacaatacataaactcatattttacccatcttttccccaatcttgttgatgatgtaattgaggaaattaagaagccctgtctggttccttgctcataggcagagatgaatctaaactacgcctttcgtctttacaagttctttagtttgaaagttttaaagggaggaacatggctaattcagctaaaggacacagagcaaactcagaataaattcatacttaaggaaatactgtcacctataagtattttgccagcgttttgctgttgacattgctttttctaacgggttttacatacttgataggtattctatataatacttagaatatttaaaatggtgcttagtagtacaaacaagttactttatcatagatgtttgtagaataaatggagagattttagcccttcacttgtaattcaaggttagcaaagggaagtgtgttctataaatagttctgttaagttactgtcttctattgctatcttgattaccagcttactttgagaaagattgaacaagataagtgatttttgtatacctaaaactattcaacaataataatttgagtggtttaataaggattcttaatataagaaattgtaatgggggtagatgagcaaaaattggttgacttatggagatctctgccttgagcagcaattgattatcttgcaatattacaaaaatgccagaaaataattcttgatttttcacccttcttctctatttggattgtgagagaaaatatttttgaaaattttataaagaaaatattagcctcaactgaaaaaaccttttttcctcttgaatatcagtataaatatacaatatctcaaaacatacccccattgttgtgtgtcacttaataacggccatatgttttgagaaatgccttgttaggcgatttcattctattgctaacatcataaagagtacagtgcctacacaaacttagatggtatagcttactacacacctaaggttgtatggcatagccttttgttcttagactacaaacctgtaccctatgactgtactgaatacagtgggcagttgtaacacagtgatgagtatttgtgtatctaaacatagaaaagtacaataaaaatacagtattataatcttctgggaccactgtcatatatgccttccatagttgttatgtggtgcatgactttatttacatatgaattttctacctttcatctgcattaaatttctaaaaataacattgcatttaccttctcaatctataaatttaattaatttcctggatgtaattggatgggcttaccaatcataagccagcactcatattcctcccctgaagtttttttgtttgtttgtttgttttgttttgttttgttttgtttttgagacggagtctcgctgtgtcgcccaggctgtagtgcagtggcgcgatctcggctcactgtaagctccgcctcccaggttcacgccattctcctgcctcagcctcacaagtagctgggactacaggcacccgccaccacgcccggctaattttttgtatttttagtaggggcggggtttcaccatgtttcccaggatggtctccatctcctgacctcatgatctgccctcctcggcctcccaaagtgctgggattacaggtgtgagccgctgcacccagcctcctccactgaagttttaattgtggtggaggactaagtcttactttgtatcttgcaaaagacatggcactctctatcatttaggtagattttttttcaacctatcattttggtttgtatcgagttacaattttaatgaacataatttgctgctgtttgtttgatttctgtatgtacccattatcctctggaaacccacaagaatgtgagtaaaacatgaatattgggaaaaatttatatatggtgaaataagtgtatcttaaatgtataactcagtaagcttgataaatgcatacacccatcatcaatatcaagatgtttatatcatcaagatataaaacgtttcccttataacatgtagtagatacaatggagggcttccagcattgaacacttacttctccagctgctggaagtgttggtgaatgactcaccaaagttgcttttcaagagttaccctctgctaaagagagccatgttgaccgtggtcacgtccactttctgggggctgcctatatccactttctgggggccgtgggatggagggagaggtataaaggtcttggcccacttgcagcaatttgggacagttctcaaatgtcatcccagctccagaacttcccatgtgatcagttgaggcatttgttgctatgtagttcaattcatcttctccctctacccctttgtgcttccttcaactcataggttgagcatgagagagcatttttcagtggatttattttatagatacttccgtctgcttcccaggaactacccagcagcactccagaaagatgtctcatgtctgcttccagtcaacccttacctactccaaacaaccattgttttgatttctgtcaccatagattagtttcgttacttctggaatttgcacattgatggaatgaaatagtatgtcctcttttgtgtctggctgcttttgctcacaagatttatccacgttgttgtgtgtattagcagtttgttctttctgttgctgaatagtagtatttcattgtatcaataaaccatcatacatttatccccttgggtatctatagacattagggctgtttcaagtttttggctattacaaataaagctgctataaacagttttgtgtaattctgtttgtagatacatattttcatttaccgtgaactggaatttctaggtcagagttgagaagtattttaatattctgaaaaattgcttgtttcccagactgattttactgcgacagttgtagttgctctgcattctctctaattcttgttctaattgatatatttagttttgtaacattactatttgttttcttttgcgccattaattattttgtgcctttgttttgccctttctgacttattaatcaaatattttttgtattcagttttaattcctcaacgtggctttttagctggacctccttcagttatttttaggggttcctctaggaattacagtatacagtcttatcacagtttactcggagcttatagtttactatgtcaatgtaaaattaaggatcttgaaaagtattattctgtatacctcttcctattctttgtcatacaaatgttgcaaggttttcaaaacaactgtagtttctgctttgaacaatcacgtgcattttaaagaaaatagaggataaatcatctttattcgtactcacatatttgccatctgtatgctttctttttttttatagttgtgaattttatctggtattattttccttcagcctaaaaactctatttagtatttcttgtagtttgggtttctagtcagtgattctgaggtgacatgagcatccttcatgcttaaaggatgtcattcctttattgtttctgataagtcttcgtatcattttgctcttatgtaatttatcttttttctctctggtgaattgaagatttctttctttgcgtttgcactttagcatttttactattggtgcattgatgaggtttgctttgtagttctctcctacttagagactgccgagttcattggatctacagttttttcactgatttggggaaatttttgccagtttttttctcttaaatacttttggtactctcattacatgcatttagaccatttaatgctatctaacaggtagctgaaactattaattttttcattattttttgtgctttaatattgaataattttatattgatgtgtgttcagttttacttaccatttcttctgctgctccagtccattgttaagcttatccagtgaaattttcatttcagatattgtgcttgtcagtgctagaattttctttttttaaatggttttctgtcttaagagcctccatttgttcattcattttgactgtctttttcttaaagtgtttgaatatttataatagctgctttaaaatccttttcttattccaccatctttgtcatcctcggatatgttgactaatggtcacatttttatttcaccacacatgtagtaatttttaatttcatattggaaaatgtaggtgatatgttgtagaagttttggcttttgttaatttttgcagagttttgtttttgctctggtaggtagttaaattattggttgattatcttgaggcatggttttatgctttgttaaggcaggtctgtagaaagcccaaattatttaccaagcctttctagttagtctctgctgtggtgcccagcatctgaaatctgtgatcagttattttagcgttccacctgttgcttttagttgggattcttgtattcttcctcacgtttatgttgagaggtcataaagattggaggggaaattaaatgtaaatttttgaaccttcctcagctgtggctttctgctcccttgtgtttcccatccgtaatttccagtcacattggcattctcaaattctgttttctggatgctgccttttctgcctcctcttcttcttttttttttaagtagagatgagttcttgctatgttgcccaggctgtctcgaattcctagacttgaagtgatcctcctgcctctgcttcccaaagtgctgggattacaggcatgaggcaccacgcccagcctattttctgacttcttaagcagagaagacactggctttctgcttgtccagccaccacattgccatgttgactggggagtgccttcatttaaccatatagatttggatcttacccagagagtctggttttgttctttgctttctagtttcaggtcttatgtttaagtctttaatccattttcagttgaatttttcatatgatgtgagatcagcatccaatttcattcttttgcatgtggacgtcccgttttcccattgccatttttagagactatcctttccctattatgtattccttgtcaaagagcagttgaccatacacacatggatttctgggttctctattctgttccattggtctatgtgtctgtttttaatggcatgactttatgtctggaccatactgttttaattactagagctttgtaataatattttgaaatcagaaaggtttagacgttaattatgagagttcagaatttagaaatctacatgacattaatttttgcttacatatgtacactcatacatataacaaatttgtatgaattttttagtccatttcatgagaacagtgtgctaatatcaggggtttcagttgagtacattcttggtgtgattgcctttgttctgtgccttggtcatcagttgtatcttttatgaaggttgccttgcaatgtcatgccctttaccagggagattgggagagtgaacataagtggataagtaaaaaactatagctaggccgggcgtggtggcaatctcagcactttgggaggccgaggcaggtggataacctgaggtcaggagttaaagacagcctggcgaacatggtgaaaccccttctctactaaaaatataaaaattacccgggcctggtagtgggtgcctgtaatcccagctactcgggaggctgaggcaagagattcacttgaacctgggaggcagaggttgcagtgagccgagattgcaccattgcactccagcctgggtgacagagcgagactccatctcaaaaaaaaaaaaaaaccaaaataaaacaaaactatatctgctactagaaaacttgtccttatgttaagtagcagtgtcatgttatttataaatacttctttagtgagcttcttctgtgtattcagcattgaaggtgatacagagtaagagctgaatgtggcctttgctgttaatttgagacatgttagatagtgctcatgtaaacagtataacttcatccattgatgaacatttaggttgtttccacatttttactattgtgaataatgctgcagttgacatgggaatacagatatctcttttagatcctgattgtaattgttttggataactatctagtagtgggattgctgggtcattatgatagttctgtttttaatttttaaagcaacctccataccatcttcttaatagcagctataccattttacattctcaccaacaatgtacgggggctctagtttctctacatcctcatcaacacttgttttcttgtgtatgtgtgtttttaataattgccattctaacaggtatgagattatatcttactgtgattttgattcatattttcctgatatgtatgatgccgagcagcttttcatatacctgttagccatttgtatgccttctttggagaaatgtctattcaaatttgttgtctgtttttaaattggcttatttgggtttttctgctgttgaattgtaggggtttcttatgtatgttggacgttaaccccttatcaaagttatggtttgcaaatattttctcccattctgtagattgccttttcactctgttgttgactttgttttgagtagctttttagattaatgtagtcccacttgtctgtttttgcttttttgtctgtttttattttgtcacatccaagacattgacaagaccagtgtcatgaaggtgaggtgcttaacaggatcaggcaccgcagaacagaggtaaatataacctgtagcccatcacctttttttttttttgtagataaattttatttgaacacagcaactcccagttgtttgcataacgcctgtagctgctttgttgctagagtagtagagttgagtagttggtatggaagtgatcagcccccagttgcctgaagtatctatcatttggccctttattgcaaaagtttgctgacctgtgctatagagatcaaagaaatgaagaataagagtaagagttatattttatgacgaggacggctttgatgacctgaaagagtttagttttatcctgtaaacaaatgtttgctgagagcctgctgggtgtgtggcatttggttttgctggtgtgatccagaagatgatagatagcaggagattaattaatgagtgagtaaatggtaagaagtgaaggtgatgaatataaatttttcttttgtgagtatggaaagaattgagtggcagttttgtactatgagggagatttttaaatataaggaaaatatgaaaggaaaatttttagagttcctctgagagaggcagagtgtgttgtcattataggaattaatggtctaagacttgaaccagggagtacatgggcctcattacaggaaatgaatagaattgtttgtggaattaagttaataatagtaattgctcacacagctgtttttaaatagcaaattgtgttaggtaatcagcaaaaatccattaaaatgtacttgatagttatgcagaaactgctttattggtactgacttatgatcctaatgggtaccataaaaacaaaaaacctttgcactttcacattggtatagtgttgtatgttttttgtttaatgtgtaagtccatttgtaatgttttcatcttccttttctaaccaccaaacccaaatataattgtcttgttcaagaagggcagcaacatgaactttatgagctcacagagcaatggggtgtgttcgcactgaaaagaggagtatctgtttgattgcttccctgtcttctttcccagacagaagtggaatattttattgtatggttggatttaggtctactaatttgtttgttttctgtgtattccaacagtattttgttttactgtatctccattcttttggggtgggattttcttaggactccttttattagctggcttttttgcaatgcctctgcttttttttttttttttttttttttttttggtagcgtctctagggatgttaacatacatcattaacttctcaaaggctatttagagttaatattgtgccacttcacataaaaggcagaactcttgaccttattataggtctatttactgccttcctttatgctatagttatcatgtgtattacatctgaatgcattgtaactcttaggagagaaaattattttttctttcctaagctctatgtgttttgaagacattaaaggaaaaattagtctttttatttattatatatgatactattccctaggatgcaggtcttcctctgataacattatccttcaacctgggccaggtgcgttggatcacacctgtaatcccagcactttgggaggccgaagcaggcgaatcaagccggggtcaggagttcgagaccagcctggccaacatagtgaaaccctatctctactgaaaacacaaaaattagccgagtgtggtggcgcacgccggtaatcccagctacttgggaggctgaggcaggagaatcgcttgaacctggaggcggcggttgcagtgagctcagatcgcgccactgcactctggcctgggtgacgagcaaaaactctgtctcaaaaaataataataataatgattatccttcagcctgaagaacttcttttaatatttcttataccaaagttatactggtaatgagttcttaattttctgttatttgtaaaggtctttatttcaactccattcttgaaggatatttttgctgagtatagaattggttgataattattctcccacatcccccaaccccaagcactttaaagattttttttttcacatctgctggcattcatagtttctgaagacaagttcttagttatttgaaatgttgttactttcaatgtagtatgtcactttctggccattttcaagcttttctgtatttttgggttgtcagcagcttgactatgttgtgtctatgtatggttttcttcttatttatactctctgggtttcactgagtacagtctttaatcagtaagtttgtgtctgtcactgcatttgtgaattttttggccttatttcttcaaacacttttttctaccatattttctttgttctctcattatacctatgttagtcttttaaatatcttcccttaggtctctgaggccctgtttgttttcttttaatcctttttctctttttatcaattggataatttctgatgatctctcatcatgttcacttactgttacccctgttatctccatttactcttaagaccatccaggaaatttctttctaaatttcagatatttagttttaggggtgtgtgtgtgtgtgtgtgtgtgtgtgtgtgtgtgtgtgtgttttgagacagagtttctctcttgttgcccaggctggagtgcaatggtacaatctcagctcactgtaacctctgcctcctgggttcaagcgattttcctgcctcagcctcctgagtagctgggattacaggcgcccaccaccattcccagctacttttctgtattttcagtcgagatggggtgtcagcatgttggtcaatctggtctcgaactcctgacctcaggtgatccacctgcctcagcctcccgtagtgctgggattacaggcttgagccactgcacccagccaattttagttatttttaattaatttatttatttatgagagagaatctcgttctgtcaccaaagctggagtgcagtgatgcaatctcagttcactgcacccactgcttcccgggctccaatcaatcctccaatgttagcctcccacgtagctgggactacaggagcacactgccgtgcctggctaattttaatttttttgtagacatagagttttgccatgttgctcaggctggtctcaaactcctggactcaagcaatccacctgccttggcctcccaaagtgctgggattacgggaaagagacaccacacctggcttaattttagttttttttaatgttttctttttcttcgtgagattttcacttttttttttttttcattaaaagcatgtatctttcactttattgagcatagttacagcatctgctttaatgtccttgtctgaaaattttactttgggtcatcttgctgttggcctctggtgattatcttttcccttgagattgggttacatattactgtcaaagaattttggatattatgagtgttatttgtggaaattgtggcttattttcatgttcttccaaagagttttgatttatttgttttagtgagccatttgcttttggttagactcatagcaaaaattatctcttgcctgaagttggtagctgctcagatctcaattcggttcttttagtctctgctacaaactgccttgtgcctgccctgtgaatggtgttccaggactcagccaaagatgtgggcagagataaaccaaaaatttgggacctctcttttctggccttctcccttttgggattctatcctcactttctagtgactgtggttgtcctgtctctgtcctcttttccttcaggccaaaaagacaatggggtttctgttggaattttagttactagaggttattgctgcttgcctgcaggagaaagctttcagaatgggaaactcacctgtgctggtccctgaaagctgattaaaagagaaactcacccattctggtctcttctttcaagtttatattttcatcccaatcagcctgtttttgtttactccccagagcctttatgtagttgatagcaagctagctagatattttctttccgccagccctaggatttatagtaactattagaagagaaagaacagtaggagatgagttcagagaggtgggaggcagaacctgtaaaacattgtagaccattgggtttattagtaattctgaatgagttgggaagccattggtaggttttgagcacaggatggacatgatttggcttgtttttaaaaggttgctctagtaggaggggcaagaagaagggaaaacatttaggagactattacagtaatgcaggtcagagatgatttgattgtgttaaaaatagcatcaacgttttgttttttgtttttcctttcttaaaactacgtttgtagtgcttctatggaagaaaacactggcattggtcttcagatacagggctttggtatattagattgggagaatacttggttctcaggtacgttgggagggcccttccttctttctagaaacttgacagctaatttaggggagttttaaaggtagctcaagagcctttgtcagtcttggaatgtctgttcagacagtcagaacaagtcctcaaaatacagtgaccaccatatcactatatagttcccattaaacaattcccaagtcgacccctgggaacgtattactttcaattcctggccatcaggcagtttctgtttttcttaaagagatagacttggcatttccttttggccctgtactcttacttctttgattaaatcagtcattgggttttccttttgtatctttacagggcatttgtatcagggtgatatagctagtaacaataatatagcaaaatctatgtatgaaagtcattttcaaaattagtcatttttttgaatgaaatttgccatgtgttcattaccttattgtactgtactgtggcactaaaaactttaatggaacatctgtacttgtaaatctttggtttcaacagtgccaaacaaaaattctgattggattattaaagatgaccggaaagggtgattccttctaatctttccaccggacttactttcttacatatgtgttttttagactgttttatttgacaattcactgcacagaacctaaattttttataagtaaaaaagtctataactaatgttatatactttagatgaggtagcatgttttaacttctattaaattcccttgcaattttaatattttcctagcttttcccttttttactaatgtgtagcataataaagcacttgttattatattctaactgatcctatttcacaatgaatgtctgggaaaatacatttatagatttatttcatgagtgtctaaaatgtgaaaaatacaataaaaaatcttggtgttggttttttaggtgtatattagtttacaattgattgcagcctttgagtcttatctaaaggaatatccttactctacaaatagaattgaataaagacactattaaaaatagacacattcatagctttgattatctgatatagctatctctagtcagaattctttcatcaaatcatttattggatccccctacagcagatggcaatcctgcaaaatatgttatgtttcccttatttatgacagtgctgagatttgatatttttggagtacattttactttctagaataaaaatttgatttcagtgctactaaaggcagagtgcacatgtgcaccagcgggtggggggagaaaaagagagaaatgtgtatgtgattttccctgtgcccttgctcccaactgtatgtgtgtctctttcccacagggatgggctctcatttatgataccctagcagtatggccagattgaattgcttttcttactgcttttgctgcagggacatcctaaccatttctctcattcttgtatgctgtctccctgtttcatcctttcattctttcttgggtcatcagactcaccactactaactgaaaatattttcccatttcctgtcttatttctcactttaccctagtcttggttcagggtggcggagtctttagtgataggtctggtagtggcaaatgggcagagaaggaactggtgttcatgtcagcaggtttgttcctaattcttcccttttactttcaggcaggtcttgcctaagtctcaccaattctttaatgatggtttacttactcaaactctgcagtgttaacaataatttgtttacagggctcatatgtggtggggggctggggggagggtggagggaaacacaataggtgcttagggcatagaaaagcatctcctcccaccaaaaaaaaaaaaaaaaaaattccagtttccagtttttgctagtggatcaaaacctagagatgcccataggactctggtggcttgatgaaagggaagaagtaggagagaggctgtgggatagtttttgattgacactagaaagaaaatactgttattcaaatactaagatgggagtagagcataagaaggtagtctaaatctgtgttcttcctagaaaagggagtaatggcagatgttggacttggccaagaagtttacctgttcctctaagagtcttatactctgaaaccttaaaaacttgaattttacctttctattccttctttaaggtatcagccttttagggaactgcctgtatatatagtaatttatgattgctcttagttacttttcttgttaaatgttttcacaaaagaaagaggcggattgcttttgttaagttcacaaactgttgtttttagatacgaggtctagaatttaatgttccttactggaaaatactaagttaaaacagcatgcttttaaaaatggagctcatagaatcagaatatattacatttgacttaattgattccattcagaaaaccaggtactaagagattatctatataaaaggttaacaaggaaaaaaataatttacgtctttctgttattgatcaccccttttaatcctgttgaatagaaatggaaaaaatttattagaaagtcaaataaggctcaaaagtgtttctatcattaattattgctgaactttctcttacatctgccattttggtttatgagtcaaggaactaacttctctgaaattgttgaattcgcatgcatatactagaaatgggaatgatgaaaataatatgggaatgataattcagaaataacaggaaaaatgttacttctcatcactgtattgcaactgtggtgtattttcttgtcaataggtatttttttcagattttggtcaatttgtataatatctgtgttaagttttatcttctgtgtgtaatttcctttttctgcttaccttggtcttatggctgaagctttggaaagtttattattcctgtcatatttctgtgtttgtacagccattgtctttagcagaaaggagtcattgattctaaaagatgactcttgcctttgtcagtgccagccacgaccttttactcagagtctggatatgttaacaataaaactacagagcttgagtttaaaacctagccagattcttgttattctatagcattctttgagccccttgtcatttccagtatcagtggtatgtactactctttagctggtgatgccatcacccaattaattaccattttatttcattagtctttgctttttctttattttatagaagtagagtcacttgatgaaaattgaatatgtagtttcacataattttgtgtgtctcttgaattttgcttgagatgttctctgtaactggcacccatctttcctctctctctgtttttacaaatgtatttaaaatacatgcaaagctgggcatagtggttcacacctgtgatcccagcactttaggaggccatggagggagaatcgctggaggccaggagttcaagaccaacctaggcaacatagtgtaagactctgtctctacaaaataaaaaaaaaaattaatgattagctgagcattgtggcatgttcctatagtcctagcactgaggaagctgaggcaggaggatcacttgagcccaggattttgtggttgcagtgagctatcatcatgccactgtactgcagcctggatgacagaacatgaacgctgcctctaaatgagataaaaattaaaatacacataagcctcatatttattagtcatttgatataagaaaatatgaagtcataaaaagactaagttatggtttgattattttcatcaggacaagattcatcgaaatcacttaccattatatgttcaataaaagtgattttttaaaatacaacttttcataaaattatatgcagttccatatattagtggattttgtaggttaatggtcatctttttcttggattgagtctcagaggaatacttgctgctattctacagtgttggttgcagagaaaatgcttggaagatagctcactggtgtctaatgatactggagagatggtaacagtgttttttttttgtttttttgagatggagtcttgctctgtcacccaggctggagtgcagtggcacaatctcggctcactgcaacctccaccttctaggttcaagctattctcctgcctcagcctcctgagtagctgggactacaggcgcccgccaccacacctggctaattttttgtatttttagtagagacggggtttctccgtattagccaggatggtctcgatctcctgaccttgtgatctgcccgcctcggcctcccagagtgctaggattacaggcgtgagccacggtgcccggccggtaacagtgttttttacatgacattccccaaactcatagaatatctcttaaatttggaactttaatactagctccacaggaatgaacaaaacactgttcacgtaatctctgtgttttcaaagcctctggttcacttgaaattgtgcctggaatgttgtctatactagatactcatcttttgtatcaacttttttaaaaaagttattaaaatatactttagtcacttgatacaggaagtacagattcataaaaataatagagtcctaataactaagttagtaattagtacattctactttggaaactgacccctcccccttccctgctttttgttacccatcctttcaatttggcaattgtgtcactataaaagagccttagtaatcattgcaaattaatggagaatttgtggcatttaatttattacataccacattctcacctaaattacagggaaattacagagggacttccaggaatatcttgaaagaaagataatttctaaacttagcagaatgttatcattgtagtatctaggctgttctcatgaaagaatgaaagaaagaagtcaactatttctgtgttgatgaatttcatcatagaatgaaactcagaaggggttagagaagtgtaccctccttgcagtcaaggatgaaaaagactggagtcttcaaaacagaagaggtagaaatggctggattgagagatctccaagtcttccagctttttctggggactgattcggaggtgaaaataatggagcccaagtgtcagaagatgcattaaggatgcacaataaattgttttgttggttatggcacctaattctttctcactgtgaattttcttttgccaccttcataagagtggaactgcttatttgaaatcaaattgtgtataattttagaagagatggaagtgtcacccacaaaattactaagggtgagttttcatgtcattttgattttatataactaatgttgatttgatatggttgatatagttagatttagtttgatgtcatcagttaagaatatctgatcactgatcagaaagaaaccaactttattaaattgaatgattgtttgtcttgcttcattttctagggcttaactatgaaaaatgaattattcatgttttcatgtaggcagtactaaaccagacaaagtttgggggttcatctactcctagaagtagcagtgcagggcgtggtgctggatggagagactatgccccattctaaagtctgcaaagaaatattttgattctgaattactataatttacatagggtattgcatgaggattgatggagcaatgatgaagatactttgcagtaacttatattttacaggtttctgaagcaaggattgatacttagctcttccacgaaagcgcaaataccacttgctaaattgtactctgctgtcccgtaccaaaaaaatccacaaaagtatgtttttagatatatcttttattttcttctctttttaggtattgatgaaagaggaggtacaacatcttggggaacaagtggtcaaccaagtccttcctatgattcatctagagtaagtttgctgatcaacccttgattaaagctgtaatttggcagactacgtaatttctttcatatatgctgtttcttatgagaaatgaaaattaatttcttttcatggaaatgcagtagaatacctagtacctttttgttacatttagttctttttataagctgtcaaactttggaaatttaatttcctacagttaaatattcttggtgttacttgtacacatgaactgcctacagtactctactaaagagcttagaatgcataagtgctctccatatgtatttagccatttttctttatgtgttgtttatttgctttgagagatggcattggctttcaacatactaacttctagcctctctccctcatccttgcttcaacagtcatcagccctttgcatcaggaactcaacagccctgcctcttggaagcatatcaaaacagacataacagatgacatttcttagttaacaattaagagaaaataggaccaagtcaactttctacacactgaggtcacaaggttagagccctttccagcaaaaaacaaaaacaaaaacaaaaaacccccaaagctttataaaatgagaccaggaggtggaaaattagatcaaagaattggaataaaagtaagcactctgctcccagactttctctagtaaactgacgaggttaagagatacttttccaggctgggcatggtggctcatgcctgtaatcccagcactttgggaggttgaggcaggtggatcactacaagtcagaagttcgagtccagcctagccaacatagtgaaaccccatctctactaaaaatacaaaaattagccaaggcgtgggggtgggcacctgtagtcccagctactcgggaggctgaggcaggagaatcgcttgaacctgggaggcagaggttgcagtgagccaagatcatgccactggactcaagcctgggccacagagtgagactccatctcaaaaaaaaaaaaaaaaaaaagagagagagagagaaagacttttccaaaaggccatactttaagtgaataaatttctcatttctctcagaattaaccaagagaagaaagagacaagcataagatttatgggtagttaatcctagaagcaaattgccttaatgggaggaaaactgagtaagtgactgaaatgcatagtctcagtatggtttacacaagtttgcattgaaaaatgctgagttaaaataccttttaaaatacggggttttactgttatatttggctgtagcccatgtttaatttattttaaatcctttggaaagaactgggatagtcgtatggaatccaaaaagatatataaagaggctgttaaaggtgggtttttgtgtttcacttttgagaatcagaggctgagaaagctacattgtagtgtaaagaaccctatgctgagtatgtcaggacttggattttactatcaactgtattgtgaaccagccatttaatcttggacacactatttttgtcttagctatttaatcttggacgcattgtttttgtcttgaggctacttaaactggttgatacccaaatttccttccactcttaaacgtttctgattctttgagtaatattgtgaatatgtgagataggatctagtttagattttgaaggtaggagttttatgtagtgggaaactcacagtactacttattaatattggattatttttttcagaggcttgagttactttgtaataacttgttatctcttagaatgcattaaatggtgcctgggtgccttatatttctctctctttcaggctttcttcaccgccccgcccccccaccaccccccttgagtgctgcataggattttaggagaagaaaagtactaatgtatccaaacacttatgtaatttatgatcttgaaattaagtttaccttcagacatgaaatccaaagcaaatcttgcttttctttttgctatttataggtcaaatgtgaaatgctgtattttacttagtttatttatttttagtatgtattatgtacagtgaaaagttaaattgattatatagtaagctagttttcatagaaccatagaaccacatatgtatttctacctgtctattgagagatcagatagagtgaagatttaatgctacccttctttatttttgttcccattgaaatccactctttcactaatttttctccttctatcctagtcatcgtctaaacctaaaaggtttggtgagatagttaagaagtttttcgtatcattttcaaacaaaaatctggatccagtttctccttggcaactcttcttgccaaggagaactttatggttgtctttgaagcctccctcagtactactttatagggaaattatcagcttttggggtttcatcttttaacagtattcaccatcttgaccatttttttcataatcataagcataaatgggtataattgtgttgataagaatctcaactaaagtacttcattctcctattttagtatattgaatttcttaaattcttatttaagtacattgaggttcttaaattcaaaaataaatattaatgttggctaaagactagttttgacttgttagttaaaaatttgtcaacttaaacaatgtagttgcagatacttcagtagaaatcaagtaaatgaaatttatttagactttatcatattatataaatattacatttctatcagcagattccattatttaaaaataatttgattttcagtaacatcactaaatagaaattttttattatactttttataacatttgaaaatgcttagtaggccaaaaaaagggtattagaaactgcaaaatgagtaatttgttggagatacaatatacctgctttaaacttaacatgaattgaactatctgagctgcctgccattctatccctctcccattcccatgccaaactataagggagaaacaatactttctttacaataatatgaaaccatatttggcagaagaaccctattaatattgtatgttatatgttactgtatgggaatagttacacaaagtcatattgattgaacttattctttatttaatagcttttcaagggaaatttttgctatgtacactatttgccttacagggtcctgactttaattgtaagataccattctactatagtagccttgatgcataaatgagctccacctgagttatgtattaagcggtcacaaacttcttatctctgtgttaggcttatccccattctttcagaattaggaaaagtcactctagcatggttccagtctgtgtgtctgcccttgcttttaccaaatccaccagaaaagtagcctcgcagtttagaggtgattaagtttctggttatcagaagtacctacagcaatccattcagtgaagaggtttcgctaggttgacataaaaatagacattgtacctaagagtggttataggccgggcgcggtggctcacgcctgtaatcccagcactttgggaggccgaggcgggcggatcacgaggtcaggagatcgagaccatcccggctaaaacggtgaaaccccgtctctactaaaaatacaaaaaattagccgggcgtagtggtgggcgcctgtagtcccagctacttgggaggctgaggcaggagaatggcgtgaacccgggaggcggaactcgcagtgagccgagatcccgccactgcactccagcctgggcgacagagcgagactccgtctcaaaaaaaaaaaaaaaaaaaaaaaaagagtggttatagaagaaatggtaggcatggtcagcattcttaggcaatgtggatttcacatttcctaagcatgtctcagcatgtttgagacacccagagggaaggaacaaacatttgttccttcctctctacttttgttagagtcctggtttctgcactcttcatctgctgtctacctgtgcagagagcatagacacacacatgaacatatagatagaatcatgttgtgaatagcacttccagttttagaaatttgtgaatgtggtgataaaggtaaagcacctgagactgaaaggagtgattaaaatctcaggtagtttagacatgggcaagagatctagttaatgagtttgttccctctctcccttgctttttattctttattgcatagaaatgttggtgtaccaggcataaaggccagagaatattgtggttgttcttgttcactaaggtgttaatgacttactctagtttcagattttttttttctcttcagaaggctgtgcttaagagggcagactgtgaaatcatactgcttgggtataaatcgtaactctgccacttactacctgtgtgattctggacaagttatttaaatctagtgtacttcggtttagtcatctgtgaaatggggataatgatatctgtttcatgaagttgttgaggattaaatgaggcaatatatggaaattgcatagatcaatgtctgatatgtggtgagtgctatataagtgttggctttaaacctgtgtatctcaaaattcacccactagatctatatttaacaattacacaaatttaaacacatggatacatttgcaaatatgctgtattctaagtgtaataaatgagaattatttgccgactcagtcatgcttaatttaactacttttatttattttaaatgtatgaaggacataaataaaatcaatttcccctcttcaactgtttatttctttcttgggaaagcaacagtctcttcctgccaaacttggatataaaagttatcagtctctctagtataacaccttatacatgatgagtgctctatacatgtttgctgaatataatcaaattcgggaacaatcatcagatttactagattaactaggctgggaggttgaggaaggaaagaatcaaagttgatttaagatgaagcttgaagtaggtggtggtggtattaatggtaataataagtgatttggaaacttgtactgtgtgaccatgggaaagttacttctatgtgtcttagttttctggtctctaaaattatgataattttacatgtattttgtagggttttggtgaagatgaaatgtgataataggtatgaagtatttcatttattgatataataagtgagaactgctattatattgttatttataataatttgaagtacattttcatggttatatttcttgatgtacaaattctgtttctagaatgtcgagttatatgagtttgtggaaatgtcaagaggccaggtcatcttggtttctctgcctttttaactgtgttagccaacctacgccaagctctggagtagagtattaaagtaccattgaggtttgcatcctggggtaggagtaggagagaggagtatattgatactcttttctaagatacagagttggtcattccttagtttaaaagatagaattgagttcactgataggaaaccactgataggaattacatttataggcatcatcagtgatcaagagttggcattttaatcatgaacatttttcagtttatatgtaatctattatggtagttatttttttaaaaaagaagcaatattaagttgagtagagtttgagtgctttttaaaaaaatgaattgctaaatgtccaccatggttttctcttctgtctgtattatggcttgcagaatgaaacagtcatttatctttttgctctttcttccctctgtgttttacagtatcatagaattttcaaaactgaaagatgcattggttatatatgttctgtctctttatttcctacatgaggaaactgaaacgacatgtttgagatttgaccaggtgtagatttgtgctgtatgtagagatttggctaggctatgtgactagttaatgacagcctctggcatgacagaactcagatattctgaatcttatgctagtgctttttaaccccttgactttagtacttcccaactcaaagaactttacgttttctgccatatactgaaggaatgggaaaagagagaggagaaaggtgaaaatagaagagggtctgcagctgataaaagaggacatgggacatgatatgatagaacagtttagcaagtatagtgtattgggtagaatagcatagaatttaagagcttgagcattaaaatcaagctgtcttgggttctatttctggcacttctgcctcattgctctgtgactctgagcaagttatgtgtttttactttaatctttttttcttttttcattgattaaaagggggtgggtactaataataacttcctcactaaagtttggggcttatacctgtcagtggaaaggggaaaaccagttgtgtggtgatgatttagctttaaaatacttgatttagctgctgtatatgattcagcacaagatgatatccgggattttttttttattaagggatagtaataggtatgttctgaggctttttgtttcaatacatgctatgatttctgatacctatagcaataaagggatatgaggattcagttcatttaaaaagcatcagcagtggtttttttcacagaccagttgttaaaaacaaaaacggaccatagacccaactaggttgaaaatgaaaatatgtgggtacaaggatttaagtatttctccagtcttctaaagttcatagacaaagccatagattggggccttgggataagggaaacaaaaataaataaaaactcagtgaaagtaaacataagctttcagattctatgggaaagtaaaatcagcctataagattatctggatgagattaatgtcatttttcttgcaaatcctggaccattcctgccagatatggctaaagggaactttaattttgtttagcgctctctccattcttaacaggagttcagtattttttcgttaatgtggaagagtttggctaagaacctctctatagtttgtaggtagtgagttagaaataggataatagaaccttggtttttctaatgtgctatctatacaaaaaacacaggtcattctgacctcagcagggtcatactggctggaggtgtagaaggaactggtgggtagttcatttacatttgacagcagatgccttaagagtgtatctatgggcagaggcaacctgtagtttccttcctccaacagagtccagtggcataagaacagtatagttggcctgcttttagggaggttggacttaccctgatcccccaattttaagatgttgagatttgtaaatgcattcagtttcttaaatgttaaaggtgaataaatgtgtatcttatagttcaggaaatatgcttagacatgtaagtcatatttgcctaaagagttactttttaggctgggcgtgatggctcacacctgtaaacccagtacgttgggaggctaaaatgggaggattgcttgagcccaagagtttgagaccagcctgggcaacaaaatgagaccccctctctacaaaaaatagaaaaaaaaaaaaatccaggtctggtggtgcgcacctgtggtccgagctactcaggaggctgaagtgggaggattacatgaacccaggggttgaggttgtagtgaagaaaaaaaaaaagttgctggttcacacctgtaatcccagcactttgggaagctgaggcaagtggatcgcttgagtccaggagttcaacaccagcctctgcaacatggcaaaaccccatctcttaaaaatttagccgggtgtggtggtgttggctgtagtcccagttactcgggaggctcaggcaggagaatctctagagcccgggaggcggaggttagaatgagccttactacactctagcctggatggcagagtgaaacccgatctcaaaacaaaaaacaaaaaacaaacacagcccaaaaaacttcttaactcttttaagacagcagtggagatgctgtaattaggcaacaaatagttaattaccaaaataattttctttgctactgtgagattccagaggagggagattactttggatggtcaagaaagacttaatagaggaggaagtgtttgagtagactgttacaggacagatagcatttgaatagggctggaagaaagtctggaaatatggaatgatggaaacagtacagtggtctcattacaaaattcggtagataataaatcagcttactttgtgggaaaatagtacgagataaggcaggttaacatttctgtagaaaaaaatgttatctattctttgggagccaattaaaaatagattttatacacaaaatgttttataaatattaacttactgtggtatgaagaatggatccaaggtgaaagagtgacaaaaaataggatgatctgaaaagatggtacatggacccacggataatgaaataagacttggattgggaggatagtaatcagattgcaaagttatataagaaatttcacaaaggggaaaacacaaaactggtacaactaagtgactgggaaagatataaaatcatgtagactcacttcacccacaaaatggtaactcctgaattaaacttcatgtgttttatttaggctttgtcaagttagctatggttgtattaaaacagattgtttgattttgataaatagttttccttaatacatgggaaaatcgagttgtgtgaataaagaaatataaaatagcttttactcagttgtcccatttgtcagcattgatgggtaataaagattagtgttactttttcttctctagtgtagatattttctcaaaattgtgtgtttgctattgtttttatttttgaaggggaaaaaggtatacattttatagctactaggagttcaaatacagtaattagaaaggacacacaaattttgaaatagtattttatgcctcttgatctcaggtacaatacacgagatgaagcagttaaatagcaaagcaagacagaagggtcagagaattaaagtaagtgttttctatatattgcatctgtgttcccattaatctctgttttgttatgtaactgctccttctgaatgttctgaatgtgaagaaaactatgagtaagaaaaagggtgtgttttaaagttaggtttaaataaagccagaagagtaaaatgtttttactcttagttctgtttgaaacagcacctgcctataaattataacctaaatgtttttggataagaaaaaattgggttgtgatgatgtaagcacctttaaatctcttgctagcagatatttaaagtgaaagaaagcacatactgatcagattgcccatgtttccattttaagacaattaaagcttctgtttttttcagactagcctttcttcctggggacaacacttactgagaggctttgctgtggatctttttggaaataaccttcatgtcaatttctcaccttactgtgattaactttctaggcccatgaaataacatcttgatcaggactgatctaatctttatagttttcttttttaatcttctaactgttcagattttaaagttaacaagtaaaaatcaaagcatattaatctttgaatctttatgtccctttttgtaattgttgaggtctttcttgacagcctgtttaatattttttccctaagtttagagattgcttatttgtgggaataaaaagtagggtgacacttttttgtacccacttgggtttttaaattaataacaatgaaatcataaccagcacttgtcacaatttagtttacacactttcatgttacctgctttgatcttcacacgagctcaccaagaagccatttttaaaatcttctccattttagaggtgacagaattgaagctcagaaaaggtagataacttatcagatattaaatgcttaggactttatccaggctgtctctaaattactttccctttttactgtgttgcatttgccaaattataaaagagacccccagaacagttatttctacttgtgcaggacttgaaggacagagtcactagaagtttttttgtttgtttgtttgttttttgagacggagtctcgctgtgtcgcccaggctggagtacggtggcgcaatcttggctcactgcaagctctgcctcctgggttcatgccattctcctgcctcagcctcccgagtagctgggactacaggcgcccgccaccactcctggctaattttttttgtatttttagtagagacagggtttcaccgtgttagccaggatggtctcgatctcctgacctcatgatccgcctgtctcgtcctcccaaagtgctgggattacaggcatgagccaccacgcccggccttagaagtttcaggataacggtactgccatcttacttcttataaaagcagtaattcgtattttatgtattaaaataaatgagccataggatgaatcagacaggtttgcttctagttttcaccactctatttgaccttggacaagagagttaattcctgagcctcagatttctcatctccaaagagctttttctcataggaagtgtgcaagaattaatagaggaagttttatacagtatttagctcatatagaaatctatacattgttcttctttttacattcccatgagaaatttcatgcccattttgattaaaaaaaaaaaaaaaaaaagatgttaggaatttttcaaatcttggatggtcactggagaggtagctgttttgaattcttggagtatatcctgaaaagatgatggactattagggtttttaaatgcccaacaagaagtttgtttgtttgtttctttgtttgtttgaaacagggtcttgctctgtcgcccaggctggaaatgcagtggcacagtcatggcttactgcagccttgacctcccaggctcaagtgcctctcccaccttagcctcctgattagttgggattacagaggtctaccaccacagttgaacttttggaaagttcactgtattgcaggtcttgggatttggagattattgggaaaaagaagtagggcaacccacattcttatgaatgtaaatttatacaaatctatattcttataacagattgcagattaatacattctaggaaaggaagagatttcagttcctcaaatctgtttaaaaggatatgcatctcacaaggcatttaagagacctaaattagcttatataggccaaaggattggtgtcatcaataatggttagatttttgtgtcatgtatttttgttgtcatatacttaaacacttttattctgagaacaagcttgaaacgtttcccttcaacatattgaactgatgctttaaccttcttcttataaaatgaaataattatttaaatgtcattttacatcataatcagtttgttgctttgtgcacggagcagagcatattctggtggttaggactggaaattattttgtgattaaataattaagtgccagctgtcctgaaccaaatatcttctcgatgttggtaatactgttgcatcttattgagttgacttttctgagtttttgctgtgtgtgtattactgtttattttccactaattttgccttacttccttagatcgtttttcctcagtatctttcttccctacttcgagttttgtagtctcttggaattctgtatgcacatctttatgttgttaacatggaaatgttttttttcccagctcctttcattcatgaagcttttactgagattccactatttccttgtcactgaaattagttgtggaaaacaaaaatcatcagtttatatttcataaagggagtcctcattcttatgggaaaaacagagattattgtactgtagaatgataaaagctatgataaggatggcctaggggagagtaaaagtccagaaatagaaggaatatttgtttatgaaacctccaggacatattgtatagcaagtgaaaatgataatctgttttgtaatacaaggaacagggaatttaagcctgagttctctcattagacaaatgaacttggtcaaatgggtcattttttctggacatgacatgaggtttcttttctttctttctttctttctttctttctttctttctttctttctttctctctctctctctctctctctctctctcttttctttctttctttctttctttctttccattctttttttttatttgagacagggtcttgctctgttgcccaggctagagtacagtgacacgatcgtggcctattgcagcattgaacccctgggttcaggtgatcctctgcccctgtctcccaagtagctgggactacaggcctgtgctaccatatctggctaattttttgtagagacagggtctcacttaggttgcccaggctgttaccaaattcctgagctcaagtgatcctcctgccttggcctcccaaagtcctgagattataggcatgagccactgcgttcggatgggcatcagatttctaatgtgtaaaacaaaaattttgaataagatcatagtttctcaaactggccttcataggatattaacaagcagtgtacgaatacagagcttcgtgatccaaaacatttatgtattagttaaaattaaatagacttttttattattagatttcttagtttttaataggttgtagtaaatgataaatctttaagaaaggaatagaataggccgggcacggtggctcacacctgtaatcccagcactttgggagactgaggcgggatcacaaggtcaggagatcaagaccatcctggctaacatgatgaatccccgtctctactaaaaatacaaaaatttgctgggcgtggtggcaggcgcctgtagtcccagctactggggaggctgaggcaggagaatagcgtgaacccaggaggcgaagcttgcagtgagccgagatcgcgccactgcactccagcctggctctgtctcaaaaaaaaaaaaaagaaaagaaaggaatagaataaactttttcccacatttttttccatcatagaattccctcgatattacttaagaaatgtagtttgactgctagtagcagtctcaagaaatagtaagttaggcagtgtaaacatttagctcttaacttaaatctgtgatccattgtgagtttgtttctgtataagatgtcaagtcaggtcaacgttaatttttttttcataaggctgtccagtttgccaccaccatttgttgaaaagatttttcttccctcccattgagttaacttgttatctctgttaaaaatctgttggccatatatgcgaggatcaatatctgggctctgtattgtgttttattgattttatcttcacaccaataccataactgtcttgatttctatacctttaaagtaaatcttggtatcaggtagtgtaagtcttccaccttgttattctgtttcagaattgtttgaactattctacgttctttgcatatatatattgaaaactttaaaaccagtatgtcagtttctacgaagctgtgtaggattttgattaggattgcattgagtctgtagatcagttggagggggaacttaacagtgtggaggcttttgattcatgcatatgatatatctctatatttaagtatttactttccatatatatgtatatatgtgtgtgtgtgtgtgtgtgtgtgtgtgtgtgtgtgtgtgtgtgtatatatatatttttttttttggcaaggctttgctctggcgcccaggctggagtgcagtgacatgatctctgttagtatttttagatagtttttagtgaacaagtcttgcacattttctgtttaatttattaactaaatgtttcataatttttgatgatgttataagtatttttaattgcattttttggattacaggctgccgccactgcacctgcctaatttgtatattttttttttagtagagacagggtttcaccttgttggccaggctggtctcgaactcctgacctgaagtgatctgcctgcctcggcttcccaaagtgctaggttcacagacgtgagctaccacacctggcggatctgtagtttttaaaaaaaaaaaaaacgtttgcatgtactttcttaagaatttgttatgctaatcctggcttgaaagaattagttgagaagtattacttcttcaaatttattgacaagattgtgaataatattttcttctttttaattttttattagttacctattgttaactaggtaccagaaacttaaataacacatttattgtctcgtctatgagatgggggaaatatagtattattcgatatataggttaatataggttaaattaactgacacaatgcatggatgttcttaacacagtgctggtacgtagtatgtactcaataaaacttagttgtgatgatcaaaatgacaccagaggtgcttattgacactttattttccagttatcaatatgtttcattttgctttagggtattctttagcaaatcttaatgcgacttctgcctgcctaacagtatttgttctgcttttggtgctcccatttgaagctgtgctggtgtattagcatcttctaaactattcatacaaaacccagcaagtttaacttgtaatttggcggactggtttgtacttcatttaaatttttactgtttattatcatcctgtcccctagactactagggagtccaatggtactaatcaaaccttggaagctataatgtggtacatgcatctcaggcccagacctcatgaaaaggttattcagtttattaatatattttcagataatgtctctctcttcttgtgacttcttgtgactgtaagctccttgaaggcaaaggcttttatttattcttgcatcctatcatctggcacaatgcctaatgtattataggcagtactacacatatatacatatgcattatcacacttccatatgcatattttaatttctttaatttcattaataactagattgacatgaaaagataggtaaaaaaataagatgagtgttgaaggagaaaatgggggctaaaaatcgagagcaggtaagacgagaagatgaagtatcaaaaagcacacctggcatttaggatatagattgatagtatgcattacaaatattagaactcaaagcagacaagaaatccatttcggttattgctgctgatgaaaaccatcgtatttgatcacatagataactcagtttatgtcacaattagctttagtttccttaggaagggtataagaaaagaaaggtaatgctgtgaccttttgttatcaaagtaatgctggtcttctatatttgtaagtatctgaaaattttatattatgtgcaaatgtaattaactcattatattttcgtaagtatgtgaaaagtttgtattgggtgcaaatatagtaaagcagtatcagtttggactaaatgtctgaattgaagtgtaattttattttttaggaaataactgctttttacttttaattacatgtattagctgaaactattccaataaagtaatgccacttaaacgtgcttcacagtttacatacacacatcagaatagagtttttctctggtaatggatcagatagttatttctttgattgtgtactaggtgaagatgctgacttgtgttttcataccatgttatatgaagaatactatttctcacactagaatcatggccatggaaggagatgcttccactgagaagcattaaaaaatccatgagaattgctggcacttccacatctcatgctcactccaggatacaaaccatgctttttggtagagtagggatggagtggaacagtactttttctgctttcattttttataaattcacatagtttgattagatcaattgacgtaagatacgagtcagtatatctggacacacaaataaccacaaaatccctccgctgtgtgattttattcaattctagtagatgtttctcaaactggtgaatgagtagcccctggcggttgttcctcagccttgttctctaacgtggttagagaaggaaatgcctttacttactgattttttcagtgaaaggagactgacaaccatgcagaaataagtaaaatggtctttagttacaaaagtgctatggaaatgagagggtagtgtatttagaatttaattcctttgttctttgtagcaataaggactaacctgaagagatattttctttaaataaatctataaagtattaacatattaataggaagactcacagattctaaatctgtgattttgggatatttaaggagacttaaagatcattctaaaaacgctttctcaaattaaaacagcagctttcttgaaaaataatttagatgctctttcaaattgaaaaattacagaagttcaaaatgaggaagtattccacttccaagaaaaacctgattagttacttcagtaagctgctcattgaaaataaatgtctctactgacaggattatattttagttttaagaagctaatttatcatttaaaggttatctctaaaagttaggttttgtatatctaatgtactcacagttacacctacctctcataacttgatagtgaaacctttctgtttttcaaagggagttccagcatttcagctgctgagcactctgcaagagaaactgtatactgtacatcagaaagcaggggtactgtctgcctttgatgttaagtagaaatgaagacttccttcattgccggttctttgttggattattcacatggcacctgtgtcctttagccagataatcactgttgatttcagagatctaggaattgaggaaggggataataggtctgtctcttaacaagccgttttgcattcagttgctatttctgggaagcttcagtactgcagaacgaatcacagagtccctaaggaagattagtgccccctatcatgctgtttctcttgttgagcattcaattgatgttggatttagggccctgacccaaaagattttgatatctctgtgaataatttccttttttgcaattgtcagtgcattacagctaggccattcggatgccttttattagaatggagttacatagcctttcccaattaattataatgaatattaattcttaactataattgccaaatcattatcataaactttaacataagggtactcaactactggctctgacgctgtagaaatttgcctctaggttttttgaggcctctgtatgcattttccatgggaattatgttagcatcccagaagactactgtacctattcccaccttgggcaagagaaaagttctgcggtagataaaaatgtctgcagtagatgttcacttagcagcggaggtttttccatttcccattttgtttgtggcttcatgagagtcccccagtccaaacagtttactaaagctcttatgactgtctccactgttgtgagcaccatttgccaaactgggtagttaaattttgttttgttttgttttgttgttgcattttcctactttcattcctttattcttatgaattactgtttgaacagatttattcttcattttgtatggcttcagcctgtcattgagccattcagttcacaatagttctatcggggagcagttattactagaaaggcagcatttcatggtgggctctggacagacagcctggattcaaatccccatcctactatttactgttagactttgggtgatctgtgtaaattttctgtgcctcttgcctcatctgtggaatgggaataatagtaactagttcatagtgttgtaaagattaaatgaataaagcctttagcccaagttctggcaaatggtatcgccaaatgtatgctcatgctattattatttttattatagtaatagttattactttttagttggagcctcactctgtcacccatgttggagtgcagtggcgtgatctcagatcactacagcctctgcctcctgggttcaagcgattctcctacctcagcctcccaagtagctgggactacaggcgcatgccactacacccggctaatgttttttgtttgtttgtttgttgtttttgttttttgtatttttagtagagacagggtttcaccatgttggccaggctggtctcgaactcctgacctcaagtgatccaccagcctcagcctcctaaagtgctgagattataggcaaaagccactgcacccggcccatgctattatggttagtactgttacacaaaacctcaaattagggaggatgagtgaagattcggtaatatattcctggaaggaaccactgatctatcagctgtggcttatctactttcaccttcaaggaaatgaatctaggccagggatttagcacatatgtgagccagttattaaataaacattgtttcactattatacttttaattggaacttacccttaaagatgattggctttagtcatggggcaggaagagggagtgtaaataagtggctcatggtcaactgccctgactagtaacagaattcaaaagtactgtcttagtggttcctaccaagatatgcagtactattttaatcatgaactgtgtattattacggccatgggtcagattctaaaagtcagcagcagccagtcttgttgccatgactcttaacagtccacacaacactggctatcaagataggataccagtgacaaactaaaaatatatggtatatcttgcagattttaatctattggtgcctggagtaatgtatgcaactttatttatagaaacttaagatgaaccgaagaggctagcaaagattaactcatttaacaaatgtgtcttgaacattttttatggcaaaggactgcctttggacccaggccaaactatttcagataagaatatagctacactaacggttaagtgaactgataaggaaatgtaatcatgattgctttgctttttatcatttgggaagtgtgtcacaaattacatacaacttacaaggggattttggaagccacctttcataagtttggagctttcatgatgcagcaagagatatgagactttccccctaaatgataacatatttctattctagagaacagtttggcaatatctagtaaatttgaacacaagcataccttgcaaaccagtaatttcacatttagataattgaccccaagagaaaatttcatataaattcgtacaaggagacatattcctaaaatgtttataacaaccttatttgtaatagggagaaattggaggcaagctgaatgtcaatagggaattggataaattgtggtatgtttataaatagagtattctataggagtgacatgtatataccagtgctacacgttgtcagcatacatcagtcttatatattgaatgttaactgaataaagaaaaagagatactatttagaaacataaaaagtgatgctatatatcatttagataataatatgtaatgaaagtattaagtaatgtgtgaaaatgataaaaaacaaatttaggatagtgtttgcttctaatgggaattataattacataggggtttaaactatactggtaatgttctatttgttgagttgtgggcacatgactttttattatgtacattttaatatgtctggactagtttagaaacatttaaaaattgaaagaaaatgtgtcttgttgatgtttgcatttcagtggagataaaaagagatttttttcctgcttacttgatgcgatttttgtacattctctcgtttctacaatgggtatatgttattttaatcatgttaaaggaaaatctgagaaataatatatcttttagaaaaataaacgactgttttaggaatttttggaaaatataggcaaatgaaaaaaatactaacactttttataattaattttctagtcttctttctataaactttatttatttgtttttaatttttaaaaattttttgagatgagctctggctctgcttcccatgctggaatgcagtggcgtgatactggctcactgcagcccccaactcctgggctcaagggattcttctatcacagccttccaagtagctgggactataggtgtattccaccatatctggctgattttcttgtattttgtagcaccagagtctcgctatgttgccctggtcttgaacacctgggctgaagtgatcctcccacctcggcttcccaaagtattgggattacaggtgtgagcgactgcacccagctctataaattttatagaagttaagcattattgtatattcttttttcctcctatttttccggcctgttgttataaaataaacatttaatatatgggactggtattttaaagttactttaaaatatgttatcctctgaatgtaagaacatggttttgctcattggctgatgttctcttttcttgcaattagttgttgcttcttaagcatgggttttaataaaattatattgtaccttatgtttgatttattttaactgattttacaaatatcaggaaataaaaatatatacgagcagttatatgctcagtgataatactgttgatttatagtagtagaagataaaagctttaaattatgtaaaatgtgagattttcttgggagggggacagtaacattttaactgttaattttactggttgtatatagtatgtgataggcagatttatgaacacgacagtggaattatggttttacaatgtgagctctttaggatttgatgtagtgctagtgagtgctagtggtactacaaaaagaaataatagggctaatactgttttacaatgtaccgggtcctgtgacttacaggataatataaaccagttcttgccaaacttcattttgtttataaatctcctttaaatcttgttaagatgcagattctggattcactaggcctaaaactctgccagagcttctgcatttcaacaaactcccagaatttgccaataagtcagttttaaggaccacatttttagtactgaggatgtagattagtgcttctcaaactatctgcaaaagactagcttttaaaagatactatctagtatttcacaaaagaatacttcttggaaataaactaaagaatatatagaaggcaaagggagaaaattgtatattaattgtatattataaatgtatattaaatgtatattaaatgtatattatgaaattgtacattaatgtgaatgtaatctttcaataaaccttttacaggtataaagttagtacattaatttagaataaactgtttcctaaaaaatgtttagatatgtcacactatatagtacagtttttaaggacaggtaattttataaaaatacttgcccttgtgctaagcagcatctcatgtatccagcatattttttgaatattctatttctaaaagtttttgattctcctcttcctcctaggccagttcaagactcgctcttccttcttggattagagtaattctataaaactacttagcattcatgaataaaatgttacctgaagagattattcatcctctcaacaaaaacttaagcacttcattacacacaaaattctatgctagtctctttttggattatgaagaggaataaaaagttcttgccctgtagaaatgtatggacctggatgacagaatctatctccctgttaagaaattttattatatgttagtattgacctgttaaaggatatcagaatcttaaaatactattaagtagctgtttccgatgtagacctgattcattaactggggtagtgtttatttttcagtcattcattacattaacagattagtcacctactacatgcccgttagtgtgcttgtcccttgtgagagattagtgagtggtaactagagatataattcccgctctcacataacagactgttgtgatcaagtcaacccacttgactttttcatagttgtgtttaactgagagagacagtgacattcaaggatttgttttagaaagtatagcgttatttatctagacattaattttggcaatttatgatggggtaagtgaagaaatacagtaagaacacttttctctctttgaaactgcatttattcttacttttttaactttccattttattaatatttcactttgaagcataaacacttatttatatccaggcctcatccagaactttctgatggcttatgggttttggccgattcttctggcttttgcccacttagagggtgtaagatttcggtaattggtgggaaatcttgtagctctttgaataccagaaacccgtggatacttgttcaatccggttagataagctagtttcttaccacctttctttctgatagttaccctgaggtctatggagaaactgattggacatttataatatctaaaactcagcagcattttaaagatttagcagctaaaacctcctcccctccctttgtcatttgttcagcacctgctatgtatgtggcaggcatcattctgaggatgtcattgttgggggaaaaagaaaaaaaatagggtccctgtgctctcagaatttgtaagacataatctctaacttggatgatgatgataataataataataataataataataataataataatataatgactagtgtttattatgtgcttactatgtgccaggaacttttccaagtgctacatatatttacttatttaatccttttgtaacaacctgtgaagtgaacgcattcttattaccatcatctacattttacagataaggaaactgagataagaaagtttaatatgccccatgccacatagcttgtatgtaccaaagatggaattacctgccagtctggctccaaaaatttcatgtttatccactacactatgctgtgcaattataacacaaatttaaattataaatttaatttaaatggataattaaataggcagttttaataagtaggagccgtgcaatgatggagtgctcactgctgtgggagcacagaataatctcacgcaatttggtcttgttagggtccagggaaagctttcctgagaaagtaatctttattcaaagagcctctttccctccctttaaaaaaaaaaaaaaaaaaaggccattgaaaagaattgaaaaattttttaatagaattttaaaaacagtggtttcttttttttaaactgattttcatacaaagaaataacaacataggtttgtaaaactgtaagtgtattctgaactgggaaagatcctctggtgatgatactctataaattggatgagataaattttttaaatgagccgttttaaaaattagccaaaagaaaaaattcttgtatttttgaggtgagaaaccagataagagtactattatataaataatactaggtgtgttctctccctctgtctccctctgtctcttcccctctctctccctctgtctccctctgtctccctctctctccctctgtctccctctctctccctctctctccctctccctctccctacccccctgctcaccttggatacaacaaaatatttgattgcccacattttgggaggccaaaatgggaggttcacttgagcccaggaattcaagactagcctggacaacataggagaccccatctcgacaaaaaataaaaatattggctggtcgtggtggtgtgtgcctgtagtcccagttactcaggaggctgaagtgggaggattgcttgagcccagcagattgaggctgcgttgagctgtgatcatgccactgcactccagcctgagcaacagagcaagaccctgtctcaaaaaaaaaaaaaaaaatttatatatatatatatttgattatgtgctgtttagtttaaatatggaagctgctttgatcacttcaggtctgttgtcatactgtagcaggggttaacatttctaagttcctgcatcaggaaatgaacatagagaaaagtatgaaatctactttatagaccacattttataatatcaaagcttttatgaagtattatgcattcatagatggaattatttaagatttaccaaccaaattttagacagattttaagtatagaaattaatggtttttgtaatcttgccatgcatcaactgattttatcaattattaatatcttgagtgctttccatttttataagatgggaacagtgattgtttaggttgtatttggaaatattttggtgttcaatagcatattgtggctaaaaggctggtgtaatagataattctgatagtattgctctgtccttcataatgtatgtcatctcatgtattaaaaaatctcgtttatcttagttgctattaacagaattcaagatcttaattaggagtcctgggagccatgtttgaccccttttattagcatagtaactttctatcaatttgaaatatgcagcatgatcattgtatatttaatgatgtcactgatttacttcctttatattttaaaattgaaatagcattcatttactggtcccattggttgatccactcgggctccaacttaaccattgtttgcttggtttttgttcttttcttgtcactgcaaccactcccttaggccatttaccttcaacctatgttctccagcctgttggaagttactacattattttgctttgttctctgctattctgtcagccccgtgagtgctctggtttatgacattttccccttttgctctatgagcagccatgcttgttgcctaactctatgtggtatttcagaagaagtttaaactcctagtcaactaacctatttctttcattggggctatatttgacagctaagctaccttctacttttaaaactacatggatgattacatacatacataaaaatattttgctattctaattgctttagtttttttttttttctttaaactgtggggtttctccctaatttattcttatctggaaatttctggtgttttaatatggtttcagtggggggtgcctggctgtcacctttctagacctttttactctgtgtttatgaaaaagatctttattccaagttgtgtaagttcttgctactagtagtgtagttgataagccagcagcatcagcatcacctatttgttagaaattcagaatcttaagtcctacccccaagaccttatgcatcttaatctgcattttagcaagatctctactcgtttgataagaacattgaagtctacaaagcattgctgtaggtatcggtcaactagatgatacattgacgtgctaatagttgtacatttctacaactgattttaaacatatgacttgtgataatcgtatttaaatatttgtgaattatttcataactattcatcttgtttcaccaaaagttatactatgggtgggtattactactactgtgtgaaaggaatgacaggaataatcccaaacagtagctacccccagtccttgaagtgaagttttggtgtacagttgtatgcgatgtaaaactgtgacaaacattttgcaactctatttgtcccttctcccagcatcagtttgcacctgtagatgaagaactattattcctttcttgtctcttggacagtggcttttaaacaaagttccatttgctaaattgaacctctaaggtgttggggaaaatatctaattttcatccttaaatcagagaaattgtgccttactgatacttgatatgtggattaatagtatatgcatataatctcagtaaataggtattgaggattcatatccaactcttgcttgtatttgaggaaaaaagtctataggctcctattttctggtgcactgtgaaaatcccagtcattagcagtgggaacagcaaaaaagttaggttagcagggtaaaagacactacatgtaatctaatctataaagttaataaattgtgtgtagtcatttagcaacaccataaatacatttcaaacttagatatatttgtatagtggtgctttaggaaatagtttttttttttttttaactgtagtgtttttactttttgttgttcaagaatgaagagaactgggagaatacaaaattgctctttcatttgcctttagcattcaaatgtgtagcgtgaacaatgtagctgttccgcaagcacattttaattggcatttttctacagtagtattgctgtaggatgacaaacaatatttaagtgagtatttttataggttttgatgccttcctttgactgtgtgcctaagaatggcagtgggaagggtggcagagagaacacccagatgtacgtgagatagtgatttgtcccttagtattcattttaagtagtaaaagcaaattctatgggccaggcatggtggctcaggcctgtaattccagcgctttgggaggccaaggctggagggtctcttgagcccacgagtttgagaccaacctgggcaacatagtgagaccccatctcttcaaaaaattttaaaaattgattgggtgtggtggtgcactactgtagttccagctactcctgggagcctgaggtgggaggatcacttgagcctgggaggttgaggctagtcagcagtgatcacgccactgcactccagcctgggcaacagagcgagggccctgtctccaaaacaaaaacaaaaacaaaaacaaaaaaatggtaagctctgtggagtgacgttagctaagagccatactattgtgtatatagggtctactaaatgtggctgtatcagacaggacttatggttatagttaccagagaacacttgtggtcataagttgtgaatggcacccagattcttcttgaatatctatcacatgtctatcagtaattctgaagtatgtaaaaatgaaacaaagatttatttgggagttagcactccagaagattagtgttaaaacagaacagcagaaggagttgtgacatgcatctataaacaattgtaatgatttgacagttatttagccctctattcctagccctttcattgaactgacagcatgcctgcaaagatagtgaggcctgtttcagccacattaatgtcctcttaaatggtagcctgcagtctggggaatgataaatgttcagtgattgatgatttttttagtccccggggattctgggtggtttcaggtttctgtgagccagggtagttttttctcttacttgggcttcgtatacgtttttccggtctttaccatgttggttttagattggcagagatatatatgacctgcagttttaattaatagagttcaaagccttgtttagaaacaatatgattttggaggtaatgctgtacttaaagagtgcgtaaaagtctgagaaccaggacaggtttcatcacatagtaattttgtaacacttgtttttgtttgtaaactttatcttttttcccctttgctttaaaaaaatatgttttaaactataaggagaaatgtaataacagctactgtgaaaagtaacattagctttattgtttttaatggtgtttgtaatttcattcttaagaatttaaatcagctatgtttaataattgttttactttttacatggctcagtttctgtaggagtatatattgttctactacagtagtattaaaatgagtataaacagaccttttttgttgaatatttgccatttaggaaaggattcatttctagcatattgattgtgaattagttttagtattttaagtcacttgtaattgcctaacgctttatttttagggtctgggggcagggagtgaataggaggataaagataagcatttccctaatttattacaactgagaaatatattttcttaatttattttaaaaaatccattgtactttccctttggatgtaaagtaatcttagaggtaattttagtaatagtttacagaattcttatagctccccatcccatcagaagagctgatgatactttgaaaacattcgtgctcatggttagtgtttatttatagaaacccacttttctttacgatcaataaagaaaatgttttttgacttaaaatcttaaaaggaataaaagaagcacttctgctgttagcttttcaaataatgaacaagaaacttggtcagaaatgaccatgtgtaagtctgtatattaattaggtgagtgtcattatgctcaattagcgggactgccaaataatctctttaatactctgatctttttctccccctagggttttacagacagccctcattacagtgatcacttgaatgacagtcgattaggagcccatgaaggcttgtccccaacacctttcatgaactcaaatctgatgggtaagttggtaattctctgcaagtagtcttctcaaagcttctttggtcagagacattttttatccctttgtccaggagggacaggtaagtatctagaagaaagttcttgagtttctaggggcatctagggcttttcttgttcagcacagcttgaggatcaaatgtccagaaaatttggggtctactcttaaagcattattgttttggtgtcaaaaaaagaagtggcagtgttttgattgtcagttttggcaatgtctttgtgacctcaagcattacatgttttctggggcagagaagtattgttttaggggcatttgtgatgttactatttctcttaacagttgtattatgttgtaattaaaaatgtgacatagcagtgattttaggcagactttacttgcattggacaatatttctcctggcacaatttgattaaaacatagtatatttagatattgcagcattgttttaagcacttggcttcatactaggacttttttgaagttttggtttgaagaagtgaagttgcactttcaagaagggtatgcactaccatctaaacttgatttttatgtttaggcaaaacctttgtggttaatcatgctctgcaaaacacccctcctttcctttctccttctctgtctcaaatgaaagtttaaagttgttcagtctaaaattataaacccaagcttgtttttttcagtttgaataccatttttttttgtgtaaatattttacccttttgcaaaacctgattgaaaataatctgtatgttttatgattttttttcttgcttatgctggggctgaaaatattacaaaaacttttatctgttttaccagttataactgtttttaccagttatggcatcatataaatatggaaagtttgtgtaattgacattgatttcattacttactttatttcttaaggacatgacctatattgtgatcttagaatcgtccttttaagacacagccatactaatctgagtagattacccaaatcccaaatcctggtggtctgcaatttatttaaaatgatttgctttgcacagtctttgtttcccttattctctatagtgtcgaggagacagaatctgatagtctagtgtggattttgccgaaggcggttgacagtttgaagccagaagaaccattagagtatgacagaagagtgaaaaaactgacacaagcaataaaacttgtgtttaaaatcacaatttgtttcagcgtaaataaatgcacatagaaaatcatggtattatatgtattatcattccagataaaaaaatcagagttaggtttacaataaattatttggctagggaaaactttctaatttattttttaaattttcaattgagcttgccatcaaagtaaaatcgatataacactccaaattatttcctttcggagtacaacttttccccaagtaggatttaatttatattaagtgtagtagggcaagtaaaagtccgtgtttttgtaattttggattaaactaagctttcttaattgagaatataactctgaactgtgaaaaatcagaaattgctctttttgtatttatgttcttacctttattcttcactcatagagatgacttttaggcccaatggaatttcatcattagtacagctttgtaccaaggtgacgattaaaattttgtacgggacaagtgtggaaattaaatgaatcctaagaggtatgcatgtcagtcagttgctctgagcagatgttgactaacaatatatctgtaattcactttgaggtaacattttctcagttggagcaattacgagcatgtgcttgttggtttctttagttttcagataattattagaatacgttcaatagtcatccataccctatgtataaaatcaacatctaaaaaaagtcttgaagtaaataaatatttgtaagtagattgatctcttaattcaaatgaaaaaaatctgcattcatgtgaactacgttgtttaggtactactttgtatcagatgcagatatacaaaccatacattttcttttcttatttttgagacagggtctcactttgtcacccaagctagagtgcggtcgcatgatgatgactcactacagccttgaactcctgagctcaagctgtcctccttccttagcacaacaccagctaattttttaatttttagttttgtagagatgaggtctcactatgttgaccagactggttttgagctcctggcctcaagtgatccttctgccccagcctcccaaaatgttgcaattataggcatgagccaccatgtctggcccagaccatacgttttatttgtgagttttaactacctaatgtaaaaatgtttacttatacataaaagaaggagacagaaccctgaaatgattaagtagataggttcaaaagaaattcactggtcattggcaatatctgatatacttcacttccttacctttatttttagtaaaaatgatcaaatgaggtaccttagtgtaaacaatctgcacgacaatagcttgcttttggaaatgaatgcctcttaaatcacaatgcagttctatacagcaacaggcaattcaacttgatatgagctgaagtaattgaactgacacccaaacgtgggtttatagcaatatatagttacagtggatagactgacttttctggccgtttgttaatttaagggagtttctggctgaaaaacctaaattattaaagctctgctgagatgtgtatggtagtatttgaagcatttggaactgttgataaccaatcatcgcaacaggtaacagttgagagtggtgctgtgcatgatgaatgttcagaaacagctaaaactaataggaaagcagtaacatttcctgttgctgtcaacatataaaaacaccattaagtgggggagggattgtacatctagggaatgttgttattttgagtattatgttcagccataagcacatttgcctgaagaaacagtggattataaagcaccactgtcttctgtgatagagctttcaaatactttaatgattttgtacattgcaaaaatgagaaattttgtctaacaagggttgataatgattcagtaatgaacaatttgcaacagaaagtgcgtttatatattcatgtatatattttgaagtgttttatgctgaatcagttaatgtttcttttatgaattgcagaaatctcctgtggatatgtcaatatgggaaagagggcttttcttatgtttcgagtgaaataagtacatctttttggcacatcactaggtaattagcatcaagcagttctgtactctgaaatattaaaactgtatgaaaagctttgaccgtagcagtgaatcccatggtcattcaaggctactatcaatcaccaagtagccttgtctgtctcaagcttcttccagctctggtccatttctccacccttgatcctctcattaatttcagtaatacttgttttcctttaccttttgataattagtcatatttttgatgatgggaggatcagtttactggttgaacttagaaacaaattattctcacagaattgcctggcttccatccccaagtgattgtgtaataaactactattatctttttaatccctccatgtttataagctttacttattttaggatgtatgtatgtgtatatgtgataaatgggagacttaaggtgtaaaattatcttcggttttgcttgttttttgagacccttaattgtgttcctttctgagacactattttgcctctagagatggtttgttaacaatttttcttttaaagagtgaatgtaatatgtggtggtacagggggaaattgcagggctgagagttaggaggtgtggattttaatccagattctgaaaatacctttacctttctgatagggtaatgctgggaattctcagaggtcttgtacagctctagaattttacaattccataatctcataaatttaataacttttattcaaccctgaaaaaggccacaactagaattataactgctattttgcaaatgattaaaactaaggcagaggacaattaagtgtttctttctgaggtcacaaagccagtaaatgttaaaactaaatgtagaactcatatctcctgactcttagttgaatgctgtttccattaggccacactgtttaggtgtttaagatacctgttgtttcttcatatctcagattttttactagctcagcattttcttaaaccatgattatggagacactgatcttgatggatgactgtggaaaaacggttccacagtgaaataactttggacaccattgcgtatcagttgttccctcttagaaattcagattgtactttggaatgttaaagactctgaaaaaagaaaaagctgatttaacttttttagcctacgacaccccaaaatcacattaggcacagaaggctttttgtaaagagcgtcattagcttctgagaaactagttttctgtaggacactgggaaatgtttctggttatttaaaggaaaaaaaaaagatcatgaaagttctctgaaaagtaaaatagcatcatgttaatagaattgctatacagtcatcccttagtatctgtgagggattgggtcccctgatgctcaagtcccttatatatatatataaaatggtatagtttttgcatataacccacacatatcctcctgtatactttaaatcatctataacttacatataatacctaacacaatgtaattgctgtgtaaatagttcttatgttggattgtttagggcataatgacaaggaaaaaaatgtctgtatacattcggcacagatgcaaccatccatttttttcccctaaatattttcaaattgtggttgattgatttcacagatgtggaacccacagatagagggcagactgtatatattgttgtaacttattttaggcatgttaactcatttaacaggttgggtctaattgctcaagtatattactgtcaaacctctgcttataagcatttgacttataagcagaccaagtgtcttcccattgctgctggaatctctttgcttaactccactttctgtatctcagaacttaaagggcacctctggtaaagcttctgtgttttatttccatttcattgtagattgcataggtttcagtggatttgtctgggaatttaagcccaagtacactttttttctgtatatttggtacctcaaataaccaaatttcaaagaaaattcttctgtaaacttgatattgcttgcaatataacctatgaaaaattctgaaatctcctagagttacaaaatatgtagaatcaccattttcagactatcaaagggtaatacaaccctgccctcaaaagttaactcttttggcttagtggggtggctcacattcccagcactttgggaggtaggaggattgcttgagcccaggagtttaagaccagcctgagcaatatggtgaaaccctgtctctacaaaaaataaaaaaaattagccaggcatggtggcacatgcctatggtcccacctacctgggaggctgagagggaggattccttgagctggggaggtggagattgcagtgagccagatcacttcactgtattccagcctgggcaacagatccaaccctgtcttaaaaaaaataataaaaaataaaaaaagatatgtagtttgatatacttgaaatttcttcactagatgagatactgaaaatgattataaagtgtcgaagggaaatagtatctgatttgacagtgtttcataaggatgaggccttttactttttccagtgttttaataaccctaaatttcatgaaagaatatgattgtatattcattgatctacattctctgacctttggctgtgctgacaaacacaaaatgttggcaccaagagaaacttgagagaaaggagcctagatacagttgaaggcactaaagccaagaaaaatgaaattacttgttagtttgaaacatggccctggccaggcacaatggctcacccctgtaatcccagcactttgagaggctgaggcaggtggatcacctgagttcaggagttcgagaccagcctgaccaacatggtgaaaccccatctctactaaaaatacaaaaatacaaaaaaaaaaaaaaaaaaaaaaaaccagtcaggcatgatggcacatgcttgtaatcccagctgtgtgggaggctgaggcaggagaattgcttgaacgcaggagacagaggttgcagtgagcccagattgcgccactgcactccagcctggatgacagagcaagactccatctcaaaaaaacaaaacaaacaaacaaaaaaacagaaaaagaaacatggcattgaccctcttgattctgactagctcacagtccctttccactacgttgcttttttcctctttttaacttcttgtgttcaaccatttgtttcatctgctacctttttctacattatagctctgctgtcttgttctttctttcactattgctcaactctcattaaccagtctgagttgttgagtaccttcctccatcttttttatgtattcattcctccatttttttctgccctttaccatgccctttttctgccttttacagaggaaagtactgtatggtagaatattaaagtgaataatattcagtctatctttatagactattattttagtgtgatagagggataagaatttcaacaattaatatacgtggcagaatgtcagtgatacgaataaattcttacagacattcagaagagattacattcaggcacaaccagaggtgatcaggaaaagttttattgtgggtcacatttattccagtcagcactctttttgttataagtgacagaacctaacttaaaccgggtgaaacaaaaagtggtgtttattaacccatttatctaagaaggctaggaatagattgatttggagcatgggggacctaggggtttaaacaatatcatcagccctccctctttcaccttgcaaatgtttcgttgaaagaataagaactggagaggcaaattgggccaaggagagtggatgtgagaagtgggaaaatttaggagtacagtgttctggtctctccttctctagctccctcactccagtatttccagattgctctaaattgttcttcatggttgctatattgtaaggtaccttattccttagtggtatggaatgtttttaatcagtggacatgtgcatttaatttataacatcctgttcctggcagtatcgtctttttccatgcccctgccctgcctctacagcctaaaaagcagttctctttctatggttagaatgaattttgatagccattctctgaagctgtttctgtgagccagagatgacctgaaggcttcttttctacccagtctgagagagaccgaagtaatactaacgccttagtttgaaagaggttccacactttccagagtactcctgtatggactcagatccctcttatctatgggtaatccgtcctagaatgaattacttgaaagagtaaccaggatttcagaaaatatagggaaaaaatatatttcatttgaattttaaaaaaatatttcaaaaattaaaattaaaataagaatataatattaaaaagtgaactatatattattcactaggtcttagagtaaacaaagaattagttgttgatttttttagcgtattcttctcagaaaatttatatggtaatactatatatcctgtatttcacatttgaatcttgttgatttagcctactatttctaactcaggtcgtaatccattagtgactttatatttgattaaatggctctttaacacctttttcaggacctcatgaagtcttcagtcttttgcatggtattcaacttatagtagatttgttttgtttatatattatgggatattcaacagaagattgatcaaagcaatcaactgtggcttgagacaaccgtactatctgtagaggatatttcagagtttttttttttttaagttatctggtctaatggattttttggtgagctcacaacattggcttaactatgcatccttgcaaactctagggacttaaatcaagtggaccacctttacttttacttgtttatccagtgcatttcctcattgtcacttgggtgtgcattgtctatgatcagtagttatctttatggatccttattgttttatagtgggccagttgcatagatctgataaatggttcttctttgaatcttcccattgtttgtgtctagttctaaccaagtgaacatgaactcctaaccagagatgttctgagttctgcctgtagggaggtggatgacaggggccgtggctacttggttgctagagaacaagagaaagattgcttttaaggagcttttgtagctttacagttctgctatatgcgtagaatttcagaagcacaccatagcacgcagttgagaatttgggacactgttttgatttaagaaaagtcctagagcagcattaacagatcttgcctcctatgtggtaacatttcggattcacttcctctttttttttttttttttttagtagagatgaggtcttgctgtgttggccagattggtcttgaactcctaggtttaagtgatcttcctgtcttggtcttccaaagtgctgggattatagacatgagccactttatctagcccagactaacttcttatagtaaagatgctgccttcatcatttaataaaggctttcagaatgttttatttaaaataaatggtttcatattaaaattctcatagatgtttgaactggataaataatatgttataaagaatagaagtagggggaggtattcctggtacttactccccataccctgaaaactctagggcctctttcaaagtgaagaattagcagtagcttgattagtggtcatggtatttatgtaagttttaattagccatcaaaataattttttaaaaaaatttgaaagcatatactgaattgctttggtttaaattgtacaagtattactattgtttgaaggtttccattacattctggtctttagttatataggtttttttactacattgctgtagttgaataagcctcacattttatgtgaggccccataaaacaattgattattttgagtgtcaattcaccatttttgtaatctccttatttccacatctcagcttctttttcttcttggaaaattcagcctttgcctttcataattcatggtttttgtgacttccagtttggtatttgttgtttttatttgtgattttagattttagggaggctttttttggtggtggtggtttttgttttttgttttgttttgttttttgagacagaatcttgctctgttgcccagactggagtgcagtaacacatctatggcttactgcagccccaacttcccaggctccagtgatcctcccactcagcctcccaagtagctaggactacaggtgtgtgccaccacacccaactaatttttaaaaaattattctttgtagagacacagtcttgctgcgctgcccaggctggtccgaactcttaggttcaagcgatcctccaggcttggcctctcaaagtgctacgattacaagcgtgagccaccatgcctggcccctgattttaggtttctgtgaacactagaacttgccattctgcctgtatttcaggactttctgatacgtacgcatgtgcacgcgtgcgtgcacacacacacgtgcatatgcacccacacacatatatatatggttctgagtttttaaatctttatcttgaaaaatgtttctttgggtatttccatatacatgatatgttttggtggttccacagtcattcttgtgttacgtatttgttttttagtttgagtatacctctggaggattatcacactttcaaagttccatgaaatttctagggagtgacaattaaatgggagtacattactagtccacttcacagcaaattaaatcgattagttaatgtatagttaattgtaaattttattagtttctcttacatacttttccacacttgtccctggtattagggattagcaaactacacacaaagagccagatagtaaatagtctaaggtctgtggtccagcataccaatatcaatgataatcgtataggtacttatatagctacttaaacatgtaagtagttatatgtttatgaagtaggccataaacatataattcatggcttatcaactaagccataaacatataactacttacatggttaaatagctatataagtacttatatatcattgatttggggctataaaaataacagttggtggcctggatttgttccataggctacatttgccagtcttgctctagataatttaacaaaaatacttgaaatagcagtaactctgccaatttgttgaagaattaataagttacatatggccgggcgtggtggctcacgcctgtaatcccagcactttgggaggctgtggcaggtggattacctgaggtcaggagttcaagaccagtttggccaacatgggaaagccccgtctctactaaaaataccaaaattagctgggcgtcgtgacgcgcacctgtaattccagctactagggaggctgagacagaagaatcacttgaacccaggaggcagaggttgcagtgagccaagatcgcatgactgcactccagcttgggtaacagagcacgactctgtctttaaaaaaaaaaaaaaaagttatgtatgtgaaattttatggaaagtaccaggttttttcttttttatttaaaaaacaaattcagacgtgatggttggtggttgtagtggtgaattatttctaaagtttctggagctatactgcctctatacagaatggtaagttattagttaggtgagttgtttttctgttgttttgttttcaaatatgggcaaatttctaggcaaatgtcagattttctctctctgaaatcctgtgtttcccttagttttctataatcagaaatctttcagaaaaaacctgcttctcaagatagcaatataagattgttagctttagtgtatcgaactgctatattgggagaggaaaaggtgaaaattaggctgcttaatagaggtgtggcagttgggcagtcgcgtctctattgagcagcctaatgcagagagaagccttcaaagaacagctgcaaagagtctgtcgagggaatctataatgagaggatagtgtgagaattgcacagtaataaaaaaagtatactgttgctctagtgaaaatcggtactgcccaacatatgagaatctccccaaagggtatgtacaataaaaatacagcattttctaggctgtgtataaataatttttgtaagataaatgtaaattgtggattttgatgcagtttataaagtatgtaattttaaaattccatgtacagtgattaatggttagtatttgaagaattttctgagtattatatgctattcattttcaacttaaggctgtcttctgtcttaaggatttaattgggaccctgcctctacaaaacattttttgaaacattagccagatgcagtggcacctgctgtagtcccagctactttccacatgtacatttggaaaagttaaacgcaaattgtataaagaaaacagtcccaaacgcacttatgaagatgaattttcatacccaataaaagaagacattgtatgttagctctaccacaatggaatttaacccaaggaagtaattgaaaatacacgtaaagatgtgtatgcaagaatgtttgccccacacagtattttataaagaaaaattaacatcacccaatatgggactaattaagttataatatggtcatatgatggataacattgcactcattaaaacttacctttcagactgggagaggtggatcacttgaggtcaggagttcgagaccagcctggctaacatggtaaaacctggtctctactaaaaatacaaaaaaaattagctgggcgtggtggtagaagcctgtaatcccagctactcaggaggctgaggtgggagaattgcttgaacccgggaggtggaggttgcagtgaaccaaaatcacgccactgcattccagcctgggttacagagcaagactctgtctcaaaaacaaacaaacaaaaaaacacttcaaaatagtattttgtgataggattttctacagtatttcatagtggaaaggcagagtaatgtattattgcagtatgtgtagattataaaatctaaagaatatcaaaaagttaacattggtctgattggaagttagtatcaggagagacaccgtatatgtgaaaatatactatattttcacaatgagcatgtatttatacagaaaaaaatacttaaataagactatctcataacataattggaagatagaggaagggaaaaaacgtttagccacaaaatccaaaaatattattggcagacttttcttgggaggcttaataagatagttgtagcaatatactaagcacgttgattcttcagcaggattccctgtgtggagccacaagaataaattttttttttcttttttttttttttttttttttttgagatggagtctttttctgttgcccaggctggagtgcagtggagcgatctcggctcaccacgacctccacctcccaggctcaagcgattctcctgcctcagcctccggagtagctgggactacaggcgcgcacacccagctaatttttctacttttagaagagatggagttttgtcacgttggccaggctggtctcagactcctgacctcaggtgatctgatggcattggcttgccaaagtgctgggattacaggcatgacccactgtgcctggccataaatctttattttgtttaacttttacttggtctgagtgatctccttgttctcctttgagcaggatttaggcattcttcactgtccctctccttttctcatctatcttgctggtctttggtggtgttttttttttttttttttttttttgtcctgtgagatggagtccactttgtcacacaggctggagtgcaatggtttgatttctgctcactgcaacccctgcctcccgggttcaagcaattctcctgcctcagcctcccaagtagctgggattacaggtgcccaccactacacccagctaatttttgtacttttagtagagatggcgtttcaccatgttggccaggctggctttgaactcctgacctctaatgatcctcccaccctggcctcccaaagtgctgggattacaggcctgagctactgtgcccgaccaatcttgctggtctttatcttcctaatgtgtatatgctgtttagctttcaaattctaacacaggttcttccttttatatgaataaccttaatagagaatgccttgtatcgccatctcttaatgttcctataaacttgattttccagttaaattgcagctccctggtgagggaacatgtctttaaacctttgtgtgtgcctcattgtacctgcataattatgtaaagttctttttgtggtggtggtggtgtttttttagacggagtctcattgtgtcacctaggctagactgcagtggtgtgcatgatttttgctcactgcaatctcactcccaggttcaagcgattctcctgcctcagcctcccgaatagctaggattataggtgtgcatcccacacccagctaatttttgtatttttagtagatacaggggttcaccatgttggccaggctggcctcgaactcctgacctcaagtggtctgcctgcctcagccttccaaagtgctgggattacaggcctgagctaccacgcccaaccatgaaaagtttttaatgagaaacgctggtttggtctttatttatgctcttgaacaagtcacttagagtcttatttttctcacttgcaaaatggggacatcagtgcaagtttacaggactgttggattgaacattgtggccacctcataaactgtaaagtgttccataaatatgagttgttatgttcgttataaggggtatttaaaaagtggttgattactgtcagcatagggataaaaagcagatcacatgggagacagtaacagctcctgtctaggaccaaagcagccagaaattagagaaaaggttgagtaaataattactccacatctatacatggcatattacacagccttcagagtcatatccttaggtgctgatagaaagatctctgagatacattaagtgaaaaaagctaagtgcagagaagcttgttctaatttgtgttagaaatgatacatatctaaatgcaatgtggtatcttggattggatcttggaacagaaaaattacataggtagaaaaaatagtgaaattctaataaagtcttgagtttagttgatagtaatgctctaatgttaatttcttagttttgacaaaagtagcgtggttacgtaagatgtaggggaaactggatgaaaagtacatgggaattttctgtactaactgacgcttttctataaatgtaaaattattccaaaataaaaagtttgtttaaaaaatagtaggcacttttgcgtttggctagagtatctctgaaagaatatacaagaaattgccaacaattattgccttctgggaagagaactcccggcaggcagaagaggaaaagaaacttcactgcatacgcttttgtattttgtaccttgtgcctgttattgccatgtgcatgtaaattgctcaaggtaatgaaaaagacaggccacagaatgggatataaaaatatttggaaaagacatgtctcataaaggactactgttcaaaatatataaagaacttctaaaatgtaacaaatagaaaacttgcactgggttaagaaatgggcaaaagacctgaacagacacctcacccaggaagataataataagcctatgaagaaatgctcaaaattgtatgtaatgtaattaaggaattgtaaatttaaatgacagtgagatatccctacacatgtattaaaacaaccaaaatccaaaacactgacaacaccaagtgctggtaacaatacggagcaacaggaattcttgttcgttgctggtgggactgcaaaatggtatagtcactttggaagacagtttgacagattcttacaaaacaaaacatgctcttaccatgcagtccaacatttgtgttccatgaagtctacacaatgaagttgaaaattaatccacacagtaatatgcacatagaagtttatagcagctttgttcataattgccaaacctggaaaccaccaagatgtccttcagtaggtgaatggataaatcatggtacattcagagagtgaaatattattcagtgctaaaaagaaatgagctatcaagccatgaagagagatggaggaaccgtaagtgcagattactatgtgtaagtgcagattactatgtgaaacaagccaatctgaaagactatatattgtgtaatttcaactatatgacattctggaaaaggcaaaacaatggagacagtaaaaaagatcagtggttgctaggacttaagggagaaggagagatgaataggaattttagggcagtgaaactactctgtataaaactttagtggtagatatatgtcattatatgttttttcaaaccaatagaatatacaacaccaagagtaaaccctaatgtaaactatgaacttggggggataatgatgtgtcaatataggttcattggccaggcatggtggctcacacctgtaatcccagcacattcagaggccagggcaggaggatcacttgagctcagagttcaagaccagcctgggtaacctaaggagaccttgtctctacaaaataattaataataataataataaaattttaagaaattagctgggttggtggtgcatgcctgttgtcctagctactccagaggctgaagttggagaatcgcttaagcccaagaattgaagaccgcagtgagcgatgattatgccattgcactcgtgcctggtgacagagtgaggccctgtctcaaaaataaataaataaaatacatacaaacatgcattctgaagatccatgaatttctaagtcaagaatatttttaaacttttatttttaggaaactacaattctaatgagtgatattagcaagtgagaagaactttttggtcaacatttagtcctttcccttgagtgcaccgcactcttgtacctttgggcagtaggaaatgggaagcatcaaagaccatcaacaacttgagaatattcaaaaatcaagataatctgtatttcagaattaagtacttacataaaacatcttagtaagaagacatatagatgtgtggggtgagggaaaggcagtacaggagaaaaatattggagcatctcagagttaattctttggtgataaaattttacctagggctgatccctatcacctttcttctccccgtacccccaaccctagaggcaagatagaaagacacaaaaacaattaatatctgggtctgtcctcaagtttactgggtgagaagtggggtttgagggttaggttttgactgtcttttataatgtcaatcaaatctgaagagtccctttttctcccctaaaatgatgattctacttaggaaactcttacacaatttcagtttttcactagccgaaagaaactggctctacaggtagagtttgagaatgtgggtgaggttgttctggtggtccccagggttgggtgttaggcaaacaattccttagagagagatctggcttggaggctcttggtgtgggggtgagggacattgttggggggtaggagtgggttcttggaaatggagttgagaaaaatgtcagtgagctaattcataacttccccttgagtttttaaagattctacttaatttgtcaaaattgtcctcaacttgtttaaaagttctgttttttaaaaagtgtacaaagagccaataacaaatgaaaatatactttcctctgtgttgtcaaaaattttattgtctgcaaaacaaaaactataattgtgactcttttaaaattataataaactatggtgaattataaatttaaggttttcagaaatatttttcaaatgattagtgttagtgtggatgagtccttgggacaggtgtttttttgtttgtttgttttcttgtatatgtgaaatctgaagtaaaaataaaccacctcttgcttaaaaagaggtttaggatgaagtggctaaatctcaaatttccctttttgcttcagtgtgtcagttaatctggctgtaggatatatttatctactgtgaagcccactgatgcatgcaaagctaagcagagtacaattttccccagtgggtcttctttctctgggcatttgtagctatgcctcagtgtgtggagtctgctggggaacgctaaaagggctaagatgtcagctattgtaaaggtactgagatcctgttttatgaagggaatgagacatccggtctttaaaaaaaatgcatatttcttatttcccataaggcagttagaagtctgcacaataatgataatacttaatattgtaaataggatatcaatttatgtggcatttaaagaattttgaaattcattgtattttgtttatcctttttctatgagtattcgaatttctattctcgtcttaatatcagagattttaatttgttcttatagttagttaacttaaacctgtggcctaggttagccattaactgaattagttcagattatttatcttaacctattgttgcgtatagtattttaggtttttgttgagatggatactattgtatatttaaaaatgcatagaacttgtcaaagatagcttaatttgcctttctaccttcataaaaatgttaaaagttaagggatttttaaaatgtcattagatattcttatctgaatcatttatatattaccataaatcacagttgtattaagtcagccatgaagatttcctccttaatgcaaatgaacgcataaggtatctagaaagcgttaatttgtgagggaacaaattaaagcggttagaattgctgtggagctgtatatgatagatgaaatattttaattgaagacacaaatagttctaatatttctaatgagaaagtgtgtagatcatttaatgtcgtaggagaccaaagtagaaatttggaaaaagtaaaaatgactcctaaattacccagcaagttgtaaagatacacctttctcagcatgcattctcatgatagcataacaatgtataatatatctgattactgtcataattgactaccttgaaagataatggttctaagggtcaataaaatacacaataagaaagatttaattaatgtgatcaaggtaggctaaaaataatatttgttcatctgagtattaagattttttagttttaggagttctattttaaatataccatagttgggggaaaaaatgatgcttttgccttgaaagcactagcagaatagattagtgtcacagatagtgtgaaactgtgacactgaatctttttggcttgtgttaataggttctgacctaatgtgtatcacattttcatttttaatacagaatctaaacaaatgctttgccagttgagaaactggcgtcatcgttccatggtgctcattaattattttctctgactggcttttatgaatttggttgaaagttagcttttaattggagaagctgagattttttgtgtacaggaagaaaataatgcaagagtagtaatgaaggctgctgctttctgtctagttccataaaaccctttaatttaggaagttcagtctatctttacaggttgcttgggctggccctagatagaatggatacattgggtgttgaaaactagaaacggacttagttcatctcactatataaatgaggaaactgaaagtaagcccctgtgtttggttagaatgccaactgatgttaaaaagattgaaacactctagaagctttaccttcagattattgccaacattaattattatgcaaaaaggggggaaaatttgatatggtaataggagattaaaatggcagagtgtggtttcctgggctaaaatgggtcagtggacagaaatgtagaattccagttaatgaggaaccatatttacattctgtctcagatgcattgtgcctggtgttagtcccatagattggactttaaatggaatcatctttttaacgtcctctcttttttggcctgctgtgatcatactctgttctagcttttttcttgttttaaaaatggagtttgtgacaactagctagcgctgaatggacttctggttggcttcttggtggaaggaatgtgttatttcaccctggacggagtcatggagtgtccagatcccagtgagtttcaagccaaactcttatgaaaacatagtgcctacaacttttgctagatgttcattgtgttcttaaaagaaaaatttcgggatcactgtgggtagggacaattccttttctctctaagacctaagcaagagagatcatttagactgaggtccttggtgtgttcttgttcagggaagatgacacaaaggggaatagaagtaatcagtaggccttgcaacccaatttgaaattcacccatgacaaccatcagccacaggaggcccaactcccatctcctctcttagtttgcctgtgtggtgcagaggaataggtaggtttggtttgtttatctttttttttttttttttttttttaagatagggtctcactctgtctcccaggctacagtgtagtggctcagtctcagctcactgcaacctctgcctaccgggctcaagtgatccttcgggctcagccccaccaagtagctgggactacaggcacgagccaccatgcccaactaatttttgtattttttgtggagacaggattttaccatgttgttcaagctggtctcaaactccagagctcaagcagtccactagcctcagcctttcggagtgctaggattacaggcattagccaccgcacctggctggcttgtttataaacagtttgtaagtggaagaggagaaagtgcagagttatccaaaagtgccatatgaacaagatgctaagccccctctccacttcttttagattaccaaagaaatctaacttcatagtgatcacaggaatatttctggagtgtagtttatattttccatgtgatttagaaggaaaggaaatcctctgcccctcatccgtcttaagaaggtgggaatgagaattgtactcaaaactttttagtccagaaacatgagcctgctgacagctgagggctctagctctctagatttgggtagaaaggcctgggggtgggaatatcctccaggcgggaatagccctgtgacctgatctcacttgaattttcaggtgatctgactttccagtgatctaagactgtagtgcaaagaagccaagtctcaggcagttttttcagggacaggccttgggttagctctgcctgaaggtagatgactactttggcagataatgtggaggaaggaacactactctttggaatgccctcagctgtctaactgtgaccgattgtgcctggcccagctgcaacttgatctcaacaaatgttcaaggagaggagctgtgatggggccacttagattgctgtatagcaatctaaggagtatagcagttgaggttccatccttccagcaaggtgtagatggcctggattttttgtggaaaaacagtggacaggcagttcatttttgtgaaattgatttggtatagcacaaattctaataatttttcctgtaagagttttactatagtatctcttattttattgagtaccttttatgtgctaaacactgtgcttaagagtgtgggaaatatcaagatgaaaaagacattaccttcaaaagaattactaaagactcagactttgtacttaataagcttatgatgagtataaaaatagaatactgtctagacattacattccatattaagctatagtaatatagagcattttatttgagtaggaaaaaaaataaaatccaaactcatttaactaaaacatgattttcagtttgaatactttaagtttcaattaagaattctgctttttcatggtaagaagttatcgtggatctcctgcacatcattgttctgtgtgtcctacttctaggataaagcctctaggctccttagtatggcacttgaagatcttcatttttctggctcaagctttgtttttttctcatcttcatctctaccaagtatcccacactctggccatatccccgtgactccctatttctagagctaatattcactttcacaagtttttgcctttcctagatgacactgaatttcttcttatccgtcaaggattagcttatgcttgacatctgtagcttcggaaatagacattcactgcttcttttgtatttccttaatgatctgtgcagctcgctgagcagcataccttagtaccatttatcatagacatttgtgtacacctctctctttttctgctgaattataaattccttgagggcaggtctccttgttatttatatttctatctgtatcttctacaatatgcctgaaatatagcaacattcagtaaattagcatttcttgactggcaatcccttacctttcttttgcttcttttttttctttttctttttcttttaatgctcatttcctaacatcccccttacctttcaagaaaggagtactgtcattgtctgctggaagatacagaactcctgttgaaaagtaaatttaggctgggctcagtcgcttaacacctgtaattccagcactttgggaggacaaatcaggagtattgtttgagaccaggagttcaagaccagcttggacaaaataacaagagctcgtctctacttaaaaaaaaaaaaaaaaaaaaaattcagctaggcgggtcgtggtggcatgcacctgtagtcccagctacttaggaatctgagacaggaggatagcttgagcccaggaggtagaggctggagtaagccatgatgatgcccctgtagttcagcctgggtgacagagtgagaccctgtctcaaaaagaagaaaaaaaatagtaaatttagagatgaaacctggctttggccccagtcttgaaataagagtcttagatcttctcaataggggtggaggactttagtgagtggcttcaattttgagaaccatatataagcctaacaactaattttttgtgatccctttttgaaaacttgtttatctcactaatatgtgatttattactctttgaaataggagcatattacatgttctgtttattactctatcaggagcttgttacttggggaagtggttgtagttggcagtcatcccaaggtactttcagccagtagaagaaactataggcatttaacctactgtaattgtttgttgagacaggatcctgttctgttgtgcaggctggagtgcagtggcatgatcgtggcttactgcagccttggcctcctgcgctcaaatgatcctaccacctcagccccccaagtagtcgggagtacaggtgcacaccaccacacctagctaatttttttatttttatttttttgtggagatggggtctcagtttgttgcccatgctggtcttgagctcctggaattaagcattccttccacttgggcctctgaaagtgctgggattacaggtgtgagccaccatgccccacgtataatgtttttataaacagttaagattttaagtggaggtagtagcgggacaggtagggtggaaagggttagccattgtaagcatttcttagggtacatgaattcctctcaattgtttctaatttcacaaaaatctcaatgtttttatttccaaatagaacaacattcttggtttcacaatatagttggttgagttttaagttgttgtatatctttggcatctagcataatgctttgcctgaaggaggcattaagaaatatatattgaatacgtgaatgaatgaaagctatttcttaccaaactcaggactaaaatgaggatttttttttttttggtaatgcaacaaggaaggaaaatagaaaacagtaagcatgtttattttgctctctgtttatgttgcatgatagcagttttaaacaattctcaaacaattaaatgtctgattgagctttggtttaggctgacagtactttgaacttttagatttgttctctttctgtagttttggaaaataaatattcttttgggttctgtttacctcataggatagataatggttatccaccctttaactggaagaattaaagatcaaaggttcaaagttctattcaaaaattatagtttagttcctcttgttgcagtaactttaatgtacttcattcatttatttatggagtgagctacataaactaataaacaaaacataagtgtattttagtcctgatgttagcttctgattatgaagaaaaacaggtaatttctatgatttcaacatcaaaatatacattctagtaatttttgatgaaattggcagtgacattagtggcattagcatcttacaaacaactattattacctgcatactgtcatggaagctattttgaaaatacttaggacctggtgaagatgtgaattatattggaagaatctgtagtaagtagaaaaaagcacaagcctgtaggcagatttttaggaaaggtcatactgtctatttttgcctagattttaattttttttcactaatgccttgtattccattagtgattgatttgggttaataagtataatctgtcagaatgttaatatattattataaattagtcaagttctgttgcttaattcctagcagagaagttttgtgcgagaaaggtcagtcattttggcgtgtggtgtaccatggatgacaatttactgaatggatgggatctatgataaagagtttagcaccctaagcaccaggtaagcagagagatgctaggcaataggagaagattgtaagatgagagagaagaggaaaacaaagatgtatttcttccaggccttaactcagaaaaataggaaaaaatgcctttttccttctctcttctgtccagttcccagacttagcatttacatagttccttactgttttggattctgtcatgattgtttccataacattgcctcattttatcctcagaaaaaaaagtggggcaggtattgttagtcccaccttatagttgaggaaactgaagcatgacaagattaagtatctttttacttgacactatcagtagtgatagggaagtattggtatccttgactccaaagcctgtttttaactatcatgtgtactgaccctgggtcctacatatacacattttcacaggtaaccaataaactttagattccttatgtagctgactttcaaataagattatggatctcagaggttgatgaatattctattattttttactgtggtatattttttattttattttattttatttttgagacaggttctggctctgctgaagagcagtggcatggtcttggctcattgcaacctctgcctcctagtctcaagagatgctcccacctcagtctcctgagtaggtgggactacaggcacatgccaccatgcctggctaatttttgtaattttttgtagagacagggttttgcagtgttgcccaggctggtctcaaaatcctgggctcaagtgatccacctgcctcggcctcccaaagtgctgggattacaggagtgagccactgaacccagcagtaaatattattatgtagtattttctaagtccagattttcttttaataattatttaaatgatatatgagagctataagatcttaccatctgggaggttacagtttatgtaataattgccattctcatgtcacttataatgcttcgttattttatttttctctatataatttaatagctgagaaggaagtattttggttaattgcagtagggtagctgagaagaagcttggggacagtataatgaagtaatttattaacaacttttattgactcccttttttgggtgtgagttgatttgaatactaaaggtttccagatttcatcattatttggcatcagtgtcactgctaaccatgtcatgtaggtttgttcttttaatgacacttttgtttatgaggaaaaacagagctaaagtagaaaaaaaaagccttatgttaaaattcaactgttaacaccttttttttttctttctttttcattttgagacagggttttgctctgcccacctctgcctcccaaggagctgtgactacaggtgtgcaccaccatacctggcctttttgttttgttttgtttttggtcaagacagagtttcactaggttgcccaggttgggctcaaacaatccccctgcctctgcctcccaaaatgcctctgattacaggcatgagccactgcacctggccttcttagcatctttaaaacccaataaaagaggtaggaaaaaaaggatcttaacatcttctttactagtaaaaattaggtctataattagatattattaactttgacagaaaatagcctcaagagttgctataattttaagctctgccatgaatgagcaaaacttctttgttactgtggattagagttactttcctacaagtatgatctgggttcaaattctggctcttgtttgtaagcatcagtttcttaatatataaatgcggatagtaattatacttacattgtaatattggtttgagaattaaaggacatacttgatgcagaaagtagtacctggcacattgatagtactctagcattttctgttattggtaaattaaaatttgtaataacatttcccccaactttggatgaaggccattttatttcatttagaatcatgccattattaatatgaaactattattaaaatacttgtataatttccatagtggttttatagactataaacatggaacgcttgcagatattttataaaaattgtttttattttgtgaagagtttatatttcaatagtctgtccatagaaatataaggggggggaaggcatattaaattaagttttgttgttgataatttcattgagtcatttttgtctgttatctttgttctatcagttcttgcattgcagaaagcttatcttgtattcagtacaatgatcaatttaattggctctgcagtgtctaggatgaggttgcttggccaggatatatttggcagtgtgaggaaggcaagcttctatgttgattataacactgccttgtcaccattgtgttctttctaagcacagacacagcttggtcccctggcagtgatatacagcaaacgtcaataacaacctttgtaaatgttaaataaaagagcaaattgaagggcagtgattcattaggaaagaattttgtctgagcaaattaactcttatttctgttaacccatgttaaagaatcactgactgtctcttgagactttggatgcagttgaactagaaactatacagatgaaggtcctcttttccctttagtgggtgctttggatcagcagtatgtgctcttcatttgaaatatctttttttttctttttttgatatactttgacatcttaccaatttgattaagcttcagacagtgctgttacccttaacttgcctcccagttaacagaaaccttctgaacttgcctgtggaaaaatttttaccatttttcagttagtggttgcgttttcagttttagatttttcagttagtggttgcattgtgcatatatgtgttacttcttcagacctacttgtctaaagtagccagtatattttcagatttttatgtctaatgtgattttcttttccagtttttcttgtcttgtttaaccagtgtaaaggcaatctaagtgtctttagagttagctagaattccagaaactgatttttaattctttcactagccatacttgaatttccatatctgtgtatgtacacacttgcctgaagatattttattttttccttaagatagaggtaaaaagaaagtgttcagattttcaaagctaacatttttttccttttttttcccccaaaggatataatgtattatctatcaaccactctctcagaataacttgtttgttttatcatgtactgtgataggttagtcatgaatttgcagttaatgaagggctatttatttcatgcctaccctcacaggttttctttcttttttcttttttgtgacggagtctcactctttcaccaggctggagtgcagtggcacgatctcagctcactgcaatctccacctccccagttcaagtgattctcctgcctcagcctcctgagtagctgggactgcaagtatgaaccaccatgactggctaatggtggttttgtttttttgtttgtttgtttgtttttttgtttttttggcagcaggtcggtgggtgggcagtgtttgtagagacagggtctcacattgtgcccaggctagtctcaaactcctgatgtgaagcaatcctctccgctcagccttccaaaccgctggaattataggcatgagccaccgtacccggtccacagctttttttttttaagtatcttcttcatactagatacgatactgtatgctatttttgagactccgtagtcaagtataattgtaaaccagctagtaaaattgaagtttcttttttcatccttgtgttatttggaaacaaaattaagaaatagagtctcttttcttcctcctactttattcaacagccctcactccatatggatactgtatactttggattttagaatattttaactcttaaaggaatgggcagtggaatcacaatatcactgatttagcagatccttggtaaatattcgtcatgtgatcctgtggcaatcctaaataggaattcacctctttctcttaagctttcccatagtactttatatctctttaaaaaaatcagttgtttacattactacattgaaagttttttggaccaccaaccttgtttctgtctcagaaccttagctaaatgcagggtattcaaatatcccatccttatttcctgtcatttcttgtcatgagtcttaggtcctactactatttacctgcttataattacacatttagtttgaagtgttttatgtttgcatgcttttctttcacattattccccctaactgaaatgcccttcatacatttttttgcctaattaaatctgtcagttcatttatcagtacttactgcatttctgccatttgctagatactgcgttgactactcggatgtacattggtaatggaagcatttatgactttgccgtcctggagttttcaacccatgcttgtcttttctagaaagccttgcctaaactcccaacttggattcagtgctcccttgctgttttgtctgtggctccctgtatatgttatgctgaaatttgctgtttgtgtacacttgcttttaggttggagttttcttgaagataggatgtcttgattcatttcttcccttggccctatccaatatctgatatatatcaagtgctcaataattgtttgttgaactgcttttaaactgtagatagattacatgatccctgccattgatgagctctcaggacttacagttctgtgtatgttttggcttttgttatagttgtttgaatgcatatctgtctctcctgttaggttgccagcttcttgaagaataaaattttatcagcatattttatttatattatatggacaattatatttctatatttttttgctatgccccaccatatctaattttacatatgggacctgtaagattttgatccttctcctaaaatgtttttggtaaatgctgatctcctgtgagagccacctgagtgaggaatctcagtgtgtaggaaagtgagacattctttaatgagagactggaagagtttggttgttaagtgggctcagaaaatgtctgttgtggcaagcctgtggccccatctactcaggatactgaggttggaggatcacttggacccaggagattgaggctatagtgagccatgattgcacctctgcactctagcctgggtgaaaaagtgagactgtctaaaaaaaagaaaagaaaggaaaggaaaatgcctgttgtctctcctctgcaaatgagctgatactgaaaggtaatctggaacaggagttttatggatatctgtttttgaaactgaaagaagtagcattttggcatgatctggagctgacatacattccagaggctatatagatgatgacatctaccagtgaggctacatgactgacgtagaaactgaggttctttcgctagtctaggacaaagatgaagcttaacttcactgatggatagaaccagactttgtcactgtttaaataatacatttttggttgttttctaaatatgaattcggttcactctgaaattagagcagttccatgagttcactgaatttatttgaacaatagtgtttgccatggtttgaatgatggtatctgctccaaaattcatgttgaaatttaaccctcaatgcaacagtgttaaaaggtgtagttggcctgtgggaggttattaaattatgacagagcttcactatcataaataggattaacgccttatgaagtggctcaaggtcgaaaggcgcaccttcttgcccttccactcttctaccctgtgaggacacggcgtttatctcttgcccttctgccatttgaagatacagtattgctcccctcagaggaggcagcaataaagtgccatgttggaagcagagagcaacccatatcagatgccagtcctgctagccccttaatcttagacttctcagtctctagaaccatgagaaataaatttgtattgtttgtaaattaccgattctatggaatttttgttacagcagcacaaatggtctgacagtgttcttctttaaaaaggaataatgttcatggatacagctctattgttcctggaattcttggggaagattctttggagttttgtggagttatatataacttactaggttgtccttgccatatttttatgatggtgagtgaacacagtatacctatgggtgagattagaataaaatagagatttttatttgtgtattacatatttagccaacatttattgtctactatatgctattctatttaaaatgttttcacttttcctgcttcttatctccttgtttccttgtacaaaaaaaaaaaaaaaaccacccccaaacctgcccatgcttcatagtcctgttcaaacatcacctcatttttaaagtcttgcttgatttttttttttcacatttttttcaccatggcacctttgaggaaataaaaatttgccttgtgttatagctttaagtccccttcatcagagcttaagcaatcttaggagagatgcatgtttgatttcctgaaacataatcactggacttcatgtttgtggccaaaaaacaaaacagaaagacaatgtaattctcattataatgatcatatatactagtaactacagtttgttcagcacatacctgtaagccaggcattgtaagaagtgtttatattcattatttcattcaattcttttaacagcattattttatgggtatagaaacaaacttgagaagtcaactaacaaacttgctgcagcgactattaagttgtgattgaggaagtagaacgaactcagatttctctgactccaaagtacatgttcttaaaatacaatgctgtgctactactatagtttctcagcttcaaagagaaccaccagaagagccaattcatcccatcattttatttcctggttttgtttttgttaggacctttggaatgtatctgttaaatacaattaaatttggaatgcagtatttagaaaaatgtgtattcactagatctcttacaaactggtcataaactaagccttctaagagtgaggctcataaattaggatgtgttcattagttgtagaaaaaattgaacagagatttgaaagggatttattctttctacataaaatagataagcagagcagaccaactaaaaaacagctttttaaaataatttaatggaaaggggtctcagattattgtggagaaaaggttgagtggatgagaaaatcaaacatttaaactaaatgcaaaataattaccaacattgaagcaaaaaagacagatgtcattcacaacaatgaatgatacaatagtaaacttcctgcctttatgtgtgtttctttcttgttaaattcaaactttagctctttgctatgtcagaaaatttttgcttttacatggctttgatgatttaaatgaagtgaatgagcatgaacgaaaataattcttaagtgaatgaaagtctgaggcttttgcaatagaaagtatataattagcattatttttggtaatgagctttattttgaagctgaaaccactgctaacaatgtttaaaattttttaatttccttgtttctttaaatgatttatttgggatactaacacagagttaaataactttgaattccattgtaagattcttttaaagtattttgtttgaaagtctttcatttcttctaattaggtagacaatctccatttgctgctaaggcaactctaccacttctctttttttttttctttttttaagacaggatcttgctttgttgtccaggctggaacatagtggcacaatctcagctcactgcaacctcagcctcctgagtagatgggactacaggcgagcaccactacactcagctaatgtaaaaaaaaaaagttttaaggccgggtgcagtggctcatgcctgtaattccagcactttgggaggccgaggcgggtggatcacgaggtcaggagatcgagaccatcctggctaacacagtgaaaccccatctctactagaaaagtacaaaaaacaaaaaaatagccgggcctggtggcaggcgcctgtagtccaagctacgcaggaggctgaagcaggagaatggcgtgaacccgggtgaacccgggagtcagagcttgcagttagccgagatgcgccactgcactccagcctgggcgacagagtgagactccgtctcaaaaaaaaaaaaaattttttttttttttccatagggacacagtctcacattgcccaggctggtctcaaattcctgagctcaagtgatcccgctacctcaacctcccaaagtgctgggattatagatgtgagccactgtgtctggtttaattcttgagtctctcctctaaaggcctctggctcagaatctaaagcaggaagtttctgttcatggcaaatgctgctgattttccattctgttctagtggagtttttcatatactttggtttccatgtttttgattccactttgttccatagagatttatcattttcatttcctgttacttgatttcagcaaaacattgatgtgaggaaaatattaaatagtacagctatgacaaacaatgctgagactggctagggaatttgggagctagcatgtttgggtatctttggctccatcatcccctgtagaattctgggcactctggttgacttcaccttggccagcatgatgggggccttcttcatggatccgattgaactggttaccatgggtgttccagacttcccaggtattgcaggtaacagctacattcttctacaaaatgaagaaatgcaggcagccacattccagaagtccttgtgctggcctccaactgctaatatcctgtcagtgcactaacattttcaccagacacaatggcttgactctcaaaaatatttcttttttcttttttttttgtgagacagagtctcactctgttgcccaggctggagtgcagtgacgcgatctcggctcactgcaagctccgtctcccgggttcacgccattctcctccctcagcctccagagtagctggaactacaggtgcccaccaccatgcccggctaactttttttttgtatttttagtagagatggcgtttcaccgtgtcagtcttgatctcctgacctcgtgatccgcccgcctccatctcccaaagtgctgggattacaggcatgagccaccgcgcccagccaaaaatatttattttttcttagagtggttgcatcaacctgattatatttctttttccgcgaccgccgttatgtctaagcattgccttagcaggaagaaactatcaactggataggaaatttgaatggggtgatgatacagatcccactgaggacagatagccaagctttcatgcccaggttcagcagcctgaccagatcgttatgaaaaattacttggaacttttatatgcagggaaacctaagaaaaccaagtatgatttgaggcctgaaatgtaactggtcttgttctcctttatccagtggtaaggtctgaaaataaaatgttgactaaagactttataatatttctataagttctattgtagtagatccagctgttaagcctgaataaaatcatatgactactgctgtgattggtaataggatgcacccagttaacttaaggccaacaacaaatgaagcaattactattttacagttacacgaggcaaacctacaggtagaatgagtgatgagactcatgaaataaataaatagaaagttattacatattagcctttaaacttaaagataccagacaagccaacaatgaatttctgaacagccatggtaatgggctagttaagttttactttattactttgtgacacatagctaatttctagaaagcaagaagttttctctttacagtggtgaatttaacattaatacttgtgttttcagtaaatacagaatgtgctgtacttaaatttttttctgcttattgtttatgtagttttaaaattattttataaccctttaagtaaaaggcatacactcttgtaaatagaagcaattctcagcttgttttcttcacatatagaaaactaaaactgtagaaagatattaaatcaactagtaactccagtgaatatggtattttataatctttaggtttatcatacttagattttgtgtgtagggaatctgattttaggtctgggcacagtggcttacacctgtaatcccagcactttgggaggccaagacaggcagattgcatgggctcaggagttcgagaccagcctgggcaacatgatgaaaccacgtccctactaaaaataacaacaacaacaaagaaatgctgggcatggtggcatgcacctgtagtcccagctacttgggaggctgagatgagaggatcagttgagctcaggaggagaaaattgcactgagctaagattgcgccactacattccagcttggttgacagagtgagaccccatctcaaaaaaaacaaagcatctgattttttaaattgagacctcaacagtccatagtaatttgtcataagtacagtgtttttcttccagaggtgcttctttgttgaatcatccttataaagttattagcaaaaatttggttgagccttctacttgcattataaaaccaaaaaggtaactgaatttttcagatttcataatctctactctccatcctctccagtataacatgctctgtgtcagtcctattggagaatcatttctcatgcatattgctttaagaaacaaaaaactaaaacccttcctttaatctacatattggaaaaacctcagttgctgaagttaaatatgtttctctgataatgtcagtctttggctccttagttagattccatctttctgtcattgatgtgccctaaaccagcctgcatctaccaatcttggtttactaccaatcttgctttattatctgatctcccttaatatctggtctccccagtgattctcaaaaggtcacagtgaggatctctatgctacatgttaatgtttaatggaaattttctatgacaaggcagtacacagaaactataagattatcaagattctttgtaattggccataattttatctgtccaatgtggctattttgtgtcttgggaacatgggtagggtcctttcttaatggaaacaaatcaaaacaataaatatatattctttcttactcttcacttgtactttttttttcttttctttttttttttttggagagagagagtcttgctctgttgcccaggctgaagtgcagtggcgtgatctcagctcactgcaacctccacctcctggattcaagaaattctcctcccttagcctcctgagtagctgggattacacgcacccaccaccacacctggctaatttttgtatgtttagtagagacagggtttcaccacgttggccaggctggtctcgaactcctgaccttaggtgatccattcatcttggcctcccaaagtgctgggattacaggtgtgagccaccttgcctggcccgcttgtactctttcttctttttttttattcatacatccagtaaatatttataaaacaattacaatatacaagaagttctgctaaactttgaggagacaaaaatggttaatattttcatcattaatagtttttggtcattcatagttcacacaagtaaaggcaacctataatagagtagcgtttatcatataaataccatcaccgtttatatagaaaattttttcatctccttacatttcaggattctgagtatcttcccagtgcttcctgcaccgatttaaacaaagtgagtcctgttactgagtttgagaatgagttgaccatttgtgaaatgttgagtgaatgagtgtgagtatatagtaatcaatagtaaaaactatttacctaataattcaaattagtcactcccagtgaaagtgtaagaatagatacagagaactctttctagaggttatggtgccccataggaagagctgtccctacttattcttcactattacgtcggttgatgagttaattggcatgtagggtcctgttttgatcactgttagaattctcgggcgagccatctaatgggatgaaacacacattttttgcttgtttgttttaacatttaaatactgtccctggacatcagaatatctaattctgaaatgagaacaattttatgagcttaccaaattcatttaacagtaatgttcttttttaaaaagggggatataatgttcatggatgcaactccattgttcctgagatgatccatgactgactcatttggaggggatcccttggagttctgtgcagttgtacataactcatttggctgtcttcagtatattttcattatatgtatgtccgcttcaagtgtgggctgttagtaagtccattttcttttatactaatgataggtatatactgattttcctactgtacatctataaacatgtaattgtactcctttttcgctaatcagatgacgagaaacaggtagctttattaagctctcaagttagaatcaagatcatgtttaacttctaccgcatttgacaaaggaaaaaggaggtcccatttcgttaagaaccttcatttatcctaggcaccacgcaaagtgcttttgctctgttcatttaatcttcataacactatgtgagaagtttgccattttttaaaatatttagaattcagtggggttttttggttccttctcagtaaccacaattctgctctgtacttcagtgtttttaataatagttttattgaaatatatcacatataataaaatcacccttttaaagtatacaattcaagggtttttagtatatttagagttgtgcaaccatcaccactaatttctgaacattttggttaccccatgaggaaaccccgtacctattagaagtcaattcctatttcctccttcacccatctcctagcaacagtttgtctttctctctgtatagatttgcctattctggatattgcatataaatagaaacacataatatgtggtcttttgtgactgactctttttacttagcgtattttcaggattcatctgtgttatgttacataatcaatatttcatttctttttatagctgaataatattccattgtatggatataccattttttatttatctgttcatcagttgactgagatttggagtacttctactctttggctattatgaataatattgctgtgtatttgctgtacaagtttttgtatggacgtattttcagttctcttgggtgtatacctaggagtggagttaccaggtaatataactctggtgtttaaccatttgaggaactgccaggctttttcccaaagtggctctgcaccattttacaatcccatcagcaacttatgaaggttccagtttcttcacatctttgccaacatgcgtctgttccttttattttagccatcttaatggtgtgaaaacctcactgaggttttgcatttccctaatgactaataatgaatataggttgggtgctatggcttatgcctataatcccagcaccttgggaggctgaggcaggcagatggcttcagcctaggagttcgagaccagcctgggcaacattgcaaaaccccatctctagaaaaattatccaggtttagtggcacgcacctgtagtcccagctacttggaaggctgaggtggaaggatcacctgagcctggggaggtcaaggctgcagtgatctgtgatgcgccactgcattccaaccctaggcaacagagtaaaaccctgtctgaaatatatattgagcataatttcatgggtttattgactacttgtgtatcttctttggaggaaactctgagacttagtgatttaatttctgaaatggagatagtggttctggccttgcactatttttgagaatgatgtaataaaaagatgtatctaatcccccagcacagggcctaacacttagaagacatttattaaacgttaatttcttctttcccattccttctccagtttcacagatgaagaaactgaggcttagagagaagacacacaagtaattcaccagggttcatcttacagttagcttgtgaacgctagattcaaatgcagatttttgtattcgtgctagattcaacactgtactcccccaacaacccctcctttttgcctatgctcctctactgtgaaatggctccttggagtaggtaaacttagttactgtatatgatactgtcttttatatctttgctgtaaaagcaaaaatagctgatttgtttaaagaaaccttttcaaggaatcgaatttaatagactgtctctttagattcatttgaaatgtaatgtgcctaaggaactgtgttttccttacactttgacctctctaggataaaatgtctgtaacagatgaaaggctcaattttggatgaatgtcttgatgcatgaccaccaaagactgtttcagctagaatggttgaagaactctggtttccagatgttattaccttaaagctaacctgtttttatatgtagtttatagtgagcaggaccactgacatatattattgaccattttgattttttttttgtggattttagagaggcagcatctgtaaattacgtgcatactgacttttgtttttgttttttaacttcacacaactccagagaaagaaaaaaatagaatctttttagacaaaagagaaacccctactcttttggcaggatttgcaaactcagatactctagagtgcattatcaggggaccagctgaggaattcattgaccaacatctccagttattgttgattaccagaagagagccgtcaattttcttgtgaagtgctgttattttaaacaacagagttgggatcagaactgtttctgaactgaaagtagagtgttaaagagattcttttttttctggttttggtgttttcaaattagtctatttttaattattaatattaaatgataatgaaaaatgtgcttgttgtgttacacacgttgctaagtactacatatattagctcataaaatcttcacaacttacgagttgtatgtattgcctgaattactatgtatttttcatatcaggaaattaaagtttagaaagtttaggtaactggtccaaaagtcacaaaattggtaagtcatggaattgggatttaaactaaattttatctgactccagagctcacctcctcacctttctatattattttttatttaattctgtattcatagtagttaaaaagcaagggttccattttctgttttgcttttcagagcgttattgtcagacatactgttaataagatatttcctgtgtctttgggggcaaaaggttcaaacgtaggtgctttcacttaggactgaatttggaatcaaaaaagagaaaatgtcttctggtggtcgcacaaggtaaacctggtggttaacagctttgaatgctgtttaattctgcctgttgctttgatgagaccagtcactgctctttatgttttttccatttctggtgaatgggtgtaatctgcattattttgagctttaaccgagctattgcatggaaagctcaacctatgtgttagttacttcagaaaattgtttggagaggttttatgatctttttattatgttgtttgggggatgggtgggtaacattataccatttttcaaatggtggtgttactctgtttagaaagcaagcaaattttaagtccaatattactgtttttacttactaatgcttctgtaaaccaaaggaatggttgtctttgtatcctcataaaagcaatcactcatcatcaattttaaatgaccacttataacaataagtatatctcattatgcttttcctgctgtacttttggaactggcacatttgatctctgttcatccctacatgatactctgaagatgactagacagagcctttaaagttatgtcaggccacaaagggagattataaatgaggagaaacttcaaggtcctctctaatcgttctacagattaataaattgaactcattgttataatttcatctgataaaggctaaacaacaaatagtaagaacctgaagtagaatctgagtcttctgatttgggtctgatgtcttcttctagtctaagatttggaaaagaagttaggtatgcattttaaagtgaatggtgtataataaaccaccagtgagtttatcttgtcagctttctctttgtggaatcatgatatcgtccagcctggcatggtggcatgtacctgtagtcccagctacttgggaggctgaggtgggagaatcacctgagcccgggaattccaggtagtagtgagctaaaattgtgccactacactccggtttgggtgacagagcaagccccctcactaaaacaaacaaaacagtgtataataataataatatcttattttgactaatcactagatttctttcccaaagggaatctctgttgtagtgggcgtattttcatcaaatgtgtacatttttttcttttagactgtagaatatgtaatcactattagccttttgtgcaaagtgtagtatttatatctacaagtaaatacttatgtatccagcatcctaatctgaaatgtgaaataattagattttctatatgttgtttttgagagagatcaaataaacatattggcagcaaaaattaatcacccaagtcaactttcagggttgtcaaagggtcaattcagattcagctacgtgtgttacactggtttccacatgatttctggctctgatgattgatgttcctaatggaatctaaggacctttaaggtgccgaattgccctctgaattatcaaagaaatctactggttaaacacgtgtgtgcccattcttgtcccaccaaggatttgagtttgctggtttgctttttttaagaatgaaacctatttttcctgatttttctttttaaattgtgtcatctgtacatggcatatagtcaatcagttattcataatactaagttatccaagatatccctgcctacatcctctctgagtaaaaggagctgacaagagctctgtggatgctacctaacagatcatggagctctgcctatgtctaattatagcaatgtttgctgaaaattgttctatttatcttctcttgtaattatgcactatacagagtcacccctcacacaccaggagaatgtgaggaaaacaaagccagtgactctacatttaaatttttttcatggtcacctaatttttatttgcaattcagttttagctaggttattttagaaggatgcaaagcctttttatccttcatacaagattaccaactaccatttttactttcatcctcctttgtttcatactattgtttaacagttgttttgtgtaggatacaagccttgcatgccaactttgatgtggcagaatgaatcatgttaccattgatctgagcctgaacagaatagccatcttcaaataggaagaagtttctagcttcaggttgttttagcactgcgtgccttgcttagcctgccgtgtaaagtcagttgcctcactcgaaacaaccctgtattaatatgcacaacatgaccattttcagtagaaggttattagaatgctagtttgtatcctctagtgaatgaaatgatgtgtgattatgaagtcatcaggcatggaccagtaagactccagagagcctgccccctccgaggtcctcagggtgccattgattggtggccatgtgtttgtgcccgatagactgtgaaatggtgtgttgctacacggctgtgttgcacctgcgccccaccgaggtgattgattggtttggtcatgtggaatgttcccatctggtctgcagtaatgtgtttttttttttttttcccatctgtgaatagcaagtgctggctgaatagttacagcaaacagtttcagaagctaaataatccttttcctctaagaacaaattgggatatgaaggagtttgtttttgcttaccttgccttttgtaaaggtagtcattctccatcaggttcctactccttctgtctaggatgttatgtgcttttctctttttacctatttttacctcctcttcataatagattacgctttctgtatttctaatttgtgcaagtttaaagcaaaatctgttcttttttgctgtttgttgttttgatatgccacttgaagtgatttgcaattttttaaaagatagtttctgtgatcataattggattatcagagtactgatgtatttttaagctttcacttaacctcacaagagtggtggtttatttattgaaaactactgatgttgcagtttaaatgtcaagaaattatttattaggttctttttttaaaagattctatagttatattgggcggtcttgtttgatatttcttaatcttagtcctttttcataattgatctattcattccacctaatgactaattacatatcagagcacatcatcaaccacattcatcatagtagaatgtaataatcaatgacatttcaacaaaggaaaaaataaatatgcaaataaggcctcattaacatttgcatgagttgtttgaataatcacgttgctgacaaggctgtaattaacagaaattgatgctgagttcagtatttgatagtgtgttttctcagcattttattgttgtcactgcgggggctgaaatgaagttctgctctacttgtaccttgactggaatttgatgtgcagggctgtgccaggtacgaaaggcttctgggagcccttgattcatctgtgacctacacttaatgcatataaagattctttatttaaattgccttatttttttaatgaagcaccattagattttagcaattatgagacaactgtagaaagaaaacaaacatgaaaattcaaatcattcattattttgccagaaatggcttatatgaatcagatacaattaagacttcaagatttaaatttgctcataccatggaaaactgatgccattaattttttttttcctctctcttaaatcttgcccagtggatcactgtcaagaggttggagcttactgtaattgaaaatcacttgcttagggaaaaaaatctaattataaaatgtacagtttgagggtttttgtgtttttttttttttgaatagctgtgcacccccacattcctcctccttttcctgtactgtttcctgtttttgtcatggatattaactgaaatgctctaaacacaataaagctgtttatgtcagttttttggatgactgcaagtgctgattataacaagtttaaggaatttcctttgttgaatgtgtacccatgccatatggctcaacatggaacattaacttgacagggataatggattgtggtatatggagacaattttgcctgcagctttactataactcattctggttggggatcacaggtttgtagtatgggatgcaacaaacatccagatggatttactttacataaaagagttgcatttatttttatttccttcctgtaattggaaaaagaactttttttaaaagaatcaaaatattaaaaagtaaacgaagggaaaattgttcaaatgaaaacatgtattctgagcagtttttttggtaaaatgctatgaaagagactatttttgtatatttagcacattaaagtcatggtgtatataagctgatactgcttttgtctttacggtagtatccaaaatgaattttcctctcaagattagaaagttgtctgtatcaaccttaaaggtgtttcaggtttgtagacataaatgatcaagcagtgtcaattatgaaattattttagtaatgcttattaaatagtagccctctctgagatgaattggatttgtaagatttgagatagaaaagctttttaaaaaagtatccagtttttctttaactgcagtatatcacatataatagaagaaaaggtttgttatttcgccaagcagtaataaagttgctgactgttggcttcttggttttatatgtatccctgtgaaagttactcttaatttatctggtgggaataagaaaactaaaagccactttggcagaatgatcatgtaaccaaaggctagttacctagaatgcttaaatacattgttgttaagaactgacatctattctagctgtgttagagggggaaaaaatctggattttttttttttcatgaaatgggcttgtaatgctaaaaaaaactagctgacttggttattttcactttctttttaaataatttagatcttcatttatcttccactctgtgtttaggtggaatatagagcttatgtcatcaattaaattatgtggaaatctataatttgtctaaataaaatcattgatctatactattgatctgcagtatccttgatacattaggtaatgtgctgtctctgagcacagtagataaagacagctatcccttgcagcttctaaacactaaaaattgctgacatctttgcaagtttattttgagtacctaggacatacacagaagtcagaggccaagctttttaaccatctttgctgtgtcaaaaaacactggaagtgggaaggaaactaggctgggaggccatgttttcttttttttctttgctcttgggagacgtttgctctttatttctcttatgaagtcacagtggcctgtcataaccatggattaaatgtttgaacacaaaaacaataattcccatgatttaagtcacagcttttaacagatcgacgtatatttcttatttctacattccaaggtatgaaaaatagctatcaatttctagtgtattatctcacactaatacatataaaggaaatatgtgaacttaccctcaaagaaacaataaaattttcagagacatcaaaataagtattttaggtttgaagatcccttttccttcatttcgtaatagatgttttctttttttgagacaaggtctcactctgtcacccaggctggagtgcagtgttgctatcatgccttatggcagcctctacatcccaggctcaagtgatcctcacacctaagcctcctgagtagctgggactgccacactcagctaatttttatagagacaatttcccatgtcgcccaggctggtcttgaactcttaggctcaaatcatctgcctgccttgtcctcccaatatgctggaatcacagacaatagacaatagccactgcttctggcagttttttttttttttttttttttttttttttttttttgagacggagtttcactctgtcacccaggctggagtgcagtggcgcgatctcggctcactgcgagctctgtctcccgggttcacgccattttcctgcctcaggctcccaagtagctgggactacaggcacctgccaccatgcccggctaattttttgtatttttagtagagacgcggtttcaccgcattagccagtctcaaggtctcaatctcctgacctcatgatctgcccgcctcggcctcccaaagtgctgggattacaggcgtgagccaccacgcccggccctggcagtgtttcttaatgtgatatccagcattgcttataaataaaacacatttttccccatgtattttaaatactgtaatttacaaaggatgtattaatgaataatgaaatttttttccactttggtaaaagtttgacacaggtataaagggcttatattgaaaaatatggtattcaaacaaaatattttagaagttactcatctaaattgcctaaaatattatttctaaaaatatttgtggattaactgagaatgtaggaatcgttgtaggatttaatacattttaaccattgatatttggttgtggtggcattgcttccataatacagtgactctgcaactgctatctagatttttttcacttgtagagtgtaataatttgcaaatgttttgtttatttttatattggcagagattataattctgaggtactatgcttataggaaagacttaaagaatattaggtcgggcacggtggctcatgcccgtaatcccagcactttgagaggccaaggctggcggatcacgagatcaggagttcgaaaccagcctggccaacctggtgaaaccctgtctctactaaaaatacaaaaattagctgggcatggtggcaggcatctgtaatcccagctactcaagaggctgaggcaggagaatcatttgaacccgggaggtagaggttgcagtgagccaagatagcaccattgtgcactccagcctggctgacagagtgagactctgtctcaaaagaaaaaaaaaaaaataaagtattaccaccagttctacttgttcttctcttttcagtggcccatccttaagccagttctctccttggtagagaacaaagacaggcaaaagagaagaatttccagtttttccattttacttttacttgttaatatcactgatggctaaatatttcatgaaattatactttgatgctcatgtctaaaatgacacttcagcgttaactaaagatttctgtttttcatgttttttcatttaacactgcttctctacagctgagcctgggtttcagtgtttaaatcggatcttggaagaagctttctgtaagcttggaatgtgccttatcttaaagccttcttctcttaccctgttaaccattcctggcttaaaaccttcagaagtcatgggatgtgggtttgcctggggagtctgctgcctccagtggaaatttaggcaactgctatggctattccagacaagtacttcacagataatcagatctgtttcctatctaaccgaaaggaaaagtgtaaagcttagaggggtaattcatatattccactttataaaccattctaacagccagttgtaggaagagggcagctgtttgtttttaaaatcacttattctcaaaagagttcatttggagacagttaaaataaggcaataggcagaaagtggtagagctagaagaggcctaactatgtttattggggttcatagataaaaagcaaatgaccaggtattttcattataagccattatgtagtcatttcttttttaagcgcgtgctaccaattgatgttttcagttatgaagagttttgctgttactaaatgatcaaaattttaggtttagaatattgtaactaatatttctgaaattgagaaaaatttaagtaagtgaatatatgattaaattaaccagtagctgagatcatttacctatttcagttgagaacttgagctaaaattaagctttatacataatcccagttccagaaaggaccttgagaggtcctctagataagatcatatttagactgtcccaaacacattagcctataatttagacaaaattaatctcagtcagtctcagtctgtttttctctctcccttctcacctctccttgacttctctttttctagttactcttccttctccaatatcctttcctcttgctctcgtaatctctgtccccttactttcctctgctctaaaatttcttactcatgtgtaccacaagaatgatggtcttttataatccgttttatggctattaattacatacactaaattttcaaagcaaagacctaatgttctattgtatagatgtttcagaaatcatcatacatataactagatttcagctgcatgttggtatccatccctaaacagtttaagggtgttagcggtgattatgataattgggagcagaagacagattctcttgactaggcaaactttagtgaatcttagtccttttccctggaaaaattaatagtatcactcattacatagggctttgctcctgcataactaaaccaccagggagatcttccaggttcctagccatcacctttatttgcaaacactaaaaaatctctaatgtttacttctttaaaccaaaaaaaaaaagttagagcattatagctgtggcctgcattcatagaaaaagtatgcttgcactaatgtttaggggctaggaatattaaagcatttgctatgacactcaagaaaaaagtaatagtaccaaaaaagctttatagatgttttcattctttaatttccataatctccctatagaagatctggaaattacagtaagccagaaaaagagacagtaaacttcattcactcacagtcctatcattcagtcattatcagtattaacatttggagtatagtagatgccgtctttcccacagaaatcggacaggcactttgccatttaattaaaaacagtttattcctcaaaaaatcaacataattaccatatgatccagcagtattacttccaggtacatacccaaaagaattgaaagcaagatctgaaagagacatttgtacacctatgttcatatcagcattattcccagttaaccaaaggatggaagtaaccaagtgtgtgttgatgaatgaatggatgaacaaaatgtggtatatgcatacaacagaatattattgagccttaaaaagaaaggaaattctgacacatgctataacatggatggatcttgataatgttttaattgaatgagtatgctaagtgaaataagccagtcataaaaagacaaatactgtataattccatttctgtgaagtacctagagtagtcagattcataaagacagattatcgggatcaggaggaaccttaaaaggttcatcatccaacaacccttgagtattttaatctccttttattcaacaaatatttatagatcatgtgctaagtgtcagacgttatgctaaggactgtggaaacaaaggaaacaagtttgataaggttcctgcattcatagatctaaggcctaatagtaaagccttccatcacttagggcttgctgattacaaagtgccgtgtaattattgcagatagcctttatttaactatttatttgggacacatagtgggctaagcctttgtgtatatttatgcattaaattcaaattctatgagatataaacaaaattattttattttatatttgaggaaactgatgctgagataattggtttgcacaggattgaacaatttacattgcaaacccaggtctatcttactctgcaatttgattttaaccagtatattatgacctctgacctcaagttcattacttccctttttttgcctttttgcatgcctttacatctctgtcaaggtattgtccaatctgtgctttgaacatctctaataatgtaatacgttctctcaaggtacttatctaatctttggatatctctggtaggtctttatgatgtgttttttaaaaaaatcagtctctatataattttcccactttggtcccagatgtgttttgaggatcacaccaaactgtgacagccggtccttcagatatttaaatcaggctatcaccctttttctccagaaatacttctccactggtatcaaatcctgtgatttcaaatgtatttattttcttagtcactgtccgtgaacaagttttagattgcttgtatttttcttactatggccccagatattgatgcagtttctccagatacagagtaatgacaggaaacactcttcagtgaaagtggtaaaagcaggcattaactaaccattccccactcgctgtttgattgattgattgagatggggtttagctcttgatgcccaggctggagtgcagtgtcacgatctcagctcactgcaacctctgcctcccaggttcaagtgattctcctgcctcagcctcccgagtagctgggattacaggcatgcgccaccacgcccaactaattttgtatttttagtagaggtgggatttctccatgttagtcgggctggtctcaaactcccgacctcacgtgatccgcccacctcagcctcccgaagtgctgggattacaggcgtgagccactgcgcccagaccactcgctgttatttttaattaaattaacagttatttcactggaaacagctataaatcttgcaactcagagaagaactatcttttccttttaaattatgtgagccttataattctgcactcaagtgtcagaaatcagtcagcctaggcacatctcccttaatttgcagtggcgggacacaggggcagttgctgtaggtaggtaggaacaggaagattagctagattatggaaaggttaggcaaaaatgtaggaactcttggttgaagaatatttcaagcttgaatgacataaagggaagaagcacaaacgggaggaatagtttgggtgtttaacagctcaagggagaaacgatatagctacagtccttggttttgtgcagcactctttttgaagccagtgatcacagcaaaaacaagaggaggtgagataagagcttctgtgcagtagagcatccacacagaagggtgcaggatgcagcagcaaatggaagttggctatatacaggggaattgattaaatatgtaaacatattatagataaaagacccattatcgctattagagaaggaaattacaaatataggaaggaacaaaaccagaatgaatcctgtggtgttggatgggaattgattatatcagtatttactcacacttttatagatagatagatagatagatagatagatagatagatagatacagaaagaaatataaatataactgtgttacatatatatgtctatacagattccctcagctgtgttcactcatagagcctgagaatagagcctggagcagcatcttgttattctggaaaggaaggatgtgctcaaagaatgatgatgaattgttagaaggttacaaaagccaggctaaaggggctcccactggccaaatctgtacattttgaacaacaaaataaatagtgatagtaatagatttataattctttgaataaagtaggaaactataagtctatgctgatatataaattatgctgataaatgaataaagttttgtgagaaacaggatttttacctagtctcaaaataccttctcacaaaatgcttatcaactaaagtgggaaaaggtaacttttcagttgaggagccttagcagacaccacctaatgaagtggtcgattcaccatcaataatgggataattcagattcatgtgccacctaacagagtgcattgagaacacagcatcatttctgtgttactctttccaatctaatcttaaggaaataccatgcaaaataaattgagggacattctaagctacagtatgaaggatatgaaagtcaagaaagttgacgagaatgaataagactagcatttgatagcacaatgtgactgcattcaataatttaattgtaagttttaaaataactaaaagagtatatttggactgattatatgtaacataaagtataaatgcttgaggtgatggataccgcatttaccctgacatcattattatgcattgcctacctttaccaaaatacttgatgtatcccataaatatatacacctattacgtgcccccccccaccaaaaaaaaaaaaaaaagaagtaaagctaatgcatgattctgaacttggtccttttgttaaaggacattattgagacatttggtaaaattcaaacagggtctgaagatagtaatgtataaatgttaattagatgattctgatggttctgtcatgcttatttgtacagtacacatcagcacatacacaccgaagtattttgtgggtggtagagcatcgtgtctgctgcttattctcaaaaataactaaggggaggaagtttcatttactaacaacttttatgtaagcttgggacattttaaaaattaaaccgaaacagcaacaaaaaaggattgttttgaacctgaatgtggaaatctcaatgtcagaatatttaaaaaatggattttgtgttccatgtatagagaaggaaaaaaatcttttaggttttaagctgggttgtaggttttctgactggggccctgtacatttgtgtggcaataggttaacaagagaaaggcagacagaggtttattcacatgtgcattgcctatacacatgagtgtacccagagacgagttactcaaaagactgtttaaaatttggagtttgtatacctaacttggtagaagaaagagagggaaaagtcagggcacttatggtaagcaaatgactttttgtaaaaataaatgggtctttaggataatagattggagataggctactttgtgacagtgtctctctgggtgtggtgctgacttctgtctccagtaagagagattagagttgctcctggggagggtttttttgacaattgagttcttttaggaggctctgcttttaggcagataaggatttcagaaactgaaatgccttcagcacaaaataattcttatgccaaagtgtaatattttaggatagcatatcctgatccaccttcacatgcactgggaaacttctattagtttttgaacagtggagtgtaatgaagatgatgttcttgtatggatagatgggagcaaagagaaactagaggcaggggtatcagttgggagccaaatgcttatgtgttcatccacaggaatctaaactgagatggtgattgttatgggcagaaagaaagggatagatacgaggcacattctaaggattatcttttggaatttgttcactcttaaaatgaaagtgacagaaagagaaatagatgatgcgtagtacaaataagttcacattctggaccagaacagggcgtattcctgaacttacttgaaaataatttgatgacatcttactgtttaatgtaaatgcttttaatgtaaacaagtagcatttaattacataaattacttagagttcttacactttataggctttcttttcttatacttgtgttcctaaacttgtgaccgttttgtactgatgattgggtaagtcaaatcatcaaatgacgtaacttcgtttgtttttccctctctttttgagacagcttctcactctgtaatccaggctggagtgtggtggcacgagctcagctcactgcaacctccgcctcctgagcccaagtgatcctcccacctcagtctcccaagtagctgggactacagtcacacatcatcatgcccagctaacttttttgaatttttttgtagagatagggttttgccatgttgcctagggtggtcttaaactcctgagcactagagatccacctgcctcaacctcccaaagtgctgggattacaagcatgagctgccatacctggcagacctaacttctttgtgcacatgttatatgggttacttcacatgcatgaattcttttaaagattttagcttatctgtaaggaatatactatatactatgagcatttaaaaatacttttcctgtatcaaatacaatgtttattgtagaaaatcaaaatatggatgagccaaaagaaaataagaacatcccttatttaagaacatttaaacatcttaataagaacatttccatatgcccagggctactgtgctgctttagtcttctgctctaaagttattctgcagggtattctgtccatagctaatattgggagaaaggcaatctaattaagcttatttacattaatgagtattggtaatgtgttacagtacagagaacctaggatttggaatcagaacctgaatcttagcagtgtgctcagccttcactacatttatgacctttggtaatttagttgacctcaatgattctcatttataaatgatttctcatttataaaatgggaataataaaacttgattatcaggggattggtgagtgtgaaataagatagaaaatgcacagtaaatgtagtttgaaatatgtaaaaaaaaaatgtgtactagggatcattgataatgagtgatggacttctaattcttacattatttgctttttgaagtttcttggtcacccatattgaccacagattgatagaatcttagctgttcatttaaaaaatatattttagagaatgaaaaagggaaaaagagttggtgtaggagtcactttggtaagcacgctgacatagcctcagtttatatactcagggatgccttcctagagctgttcctgattctctctttctttgaatccacctgatctctaaaagctaactctatgcccaaaggtcagtcagcctctccttatgctactctgctcctgctgcgtgatagttgagggtaggaaggcttttgagtttagagcagcgtttctgaagctttattgcttataagaatcatccaaggatcttgctataaaatgcaagttctagttcagatcatctggtatggtacccgagattctgaatttttacaaacttcatggccttgcctctgatctgaatattacactttgagtggagttaaaaaacatgaatgatgttttttatgtgactttttatttctaaagctatttgtaacttagggtattactcatattgttattacatataccctttaagatttcatgttaatttcttctatttaatacagtcttgttctctgtgtaaagcctcaaactcattagttgccccagggtaataatgagggtaaccagtactagcataaagtggttacacaggagaaccaataccaaaggaaaatgtaactgatagtagcaaggtttttctttcattcttaaaactttgtcaacatctctcactaatagtaaattaaatgtgaaatttaaaatgaaattactagatatacaaatttgttacattttcaccatgttacagagtattcatgtaaaaatcacttatatttaatagccagtgtattcatattgttttaaattaggattttgtcttaggagagttatcaagttctatttatttctgtgatacaaaaaatattcaaatttatattatagaactctaaggaaatgaataccggatttagtcaaggcagaaataccaagacacaagggggcactgtcttaccataatctgactgattttaatttagctttttgtttgctgtgaatgtctttcgtttccaaaattctgtcttctttgtagttaatcatgaaagcttaaatattatacattcctctaaagctgtaatacttaaatcaactgagctttcagatttcacaaatcaaatgtgctcttagcaacatttgggaacctttcattgtatttggcgtgaaattgggaagagtggatgataattagagatggtgtaacacactgttagtgtttaggtctgcggtggggaaaatcactgtaaaaataattcagttgatttggagaaatatagtgcctctgttaggcagaaatgagttgggataaagattgaactgttataagctgcagctgcatttgccataaaataccaagttggtgctgatgaatgttttgtttttattgtcatggaaacttggagctggagaatggatattctattcatttgggaaaatagcagtgccttgcataaaacataagggccttccaaagcagttccttaaatagatattggctgaatataatccaaaaagttgaggaagtaaaagtgaaataaatgcaatcatttctggatcacttcttccattctcagtactaacaatgtaactatatattcagttattaagcttattacttctagaaagtttaattccagtaagcatggtatttgtttaacatcagtgtaatagttatctaaccctttagagctatctttatatttatttccttagttgtaagatatcttttgggaactctaaacctatatcctattaaacaactacttctgatccccaaatagtttgttttttaaattaatcctgcttatctgctataatctttcattgaaatattttaaagcattttatactttttttaaagctttacccaaaataaactcttaccataaaagcactaagtgagatcattgcatgttctagggaaaaaaaacagaaagtataaaataaaaaacctataaaggtgcagttaaatccttgtgcatattttataaaattatgaatggaaagagacagtcacaggaacagaaaatgcaaaggagttttgggttcagttatcacatatgtgataatagcaaaatacaaatatggaaaatgatagtaaaatgtagataaagtgacaatacaaattaaagcagagttcctaaactttataataggaaaaggggaaattgtgagttataatggttttaccaaaggttactggccaagtttcattatctctgcaagggaaactagactttttttttttttttttaaacaaagtcttgctcttctgcccaggctggagtgcagtggtgtggtcatagctcatttcagcctccaaatcctggactcaacaatcctctcacctcagccttcgaatagctgggagtacaggtgcacgtcaccatgccctgctaatttttttttattattatttgtagagacacgatcgcactatgttgcccaggctggtgtcaaactcctgggctcaagccatcctcccaccttggccttccaaagtgctgggattacaggtgtgagccactttaccaggtcgatttttgttaacagtataataaaaagaaagaaagaaaggctagagtggggttattttagatagtttagtcagagaacccttctctgaggaaataatatttgaataaatgcaaatgcacctgtagtcccagctgtttgaaggctgaacccagggtttggaggctggaatgagctatgatcacaccactgcactccagcctgggcagcagaggaagactttgtttaaaaaaaaaaaaaaattgtctagtttccctcacagacttaatgctgtgacaaaagaacaattcatacagaggggctaacaagccaaaccagcagccttcagtgggagggaacttggaaagttggaatgttcaaggaaaatgacaaaatacaagtttacaaaaattgttttttcaaaaaatgctcaaatggccaggcacagtggctcatgcctgtattcccaacacttgggaggctgaggtgggtggatcacttgagtctaggagttcgagaccagcctgggtgacgtggcaaaaaaaaaaaaaaaaaatacaaaatttagctgggcatggtggtgtgcacctgtggtcccagctactcaggaggttgaggtgagaggatagcttgagcctggaggtagaggttgcagtgagccaggactgtgccactgcactgcagcctggttaacagaatgagacctcatctcaacaacaacagaaagctcaaatgtacttacaagcattataactaacaacaacgtgaccagttttcccacgtgagacgggtctaggtgtagtcttaaatctatgtttacattgccaggatatacaaatccctcggagaaagaacaggagtgctttaagatttttcagtataaattttactgttagttagcatatagtttgtcaaaatattttaatgaaatcagtgactttttaaattgaatataaaagtgtcaaaataaatgtaaatatgacgtagcttgcatagtgagagacagacctctaagaagcagtaaaatttaataatagcaattttcaccagtgtttttcatgccctgtggttatctgtagcatatatttagagtatatgtatgtgggcaagggttggggccaggaattaaagacctacacaacaaaatacatgatactgaatttggagaactggtcacaacatgccaaagaaaatagaagagaactaggaactggacattgtatttcataactgaaatgatgagaaagaactggaaaattgccagccttttaaccttttagaaatagctatgtgtgtagttagtacaggagatcattttcttagagcagtttgttctaaattcaaatatgtcagcagacttagtggaattcaaagtattttagaaataaaacatctaatgttggaaataagagagcacaatatcataaaaacagaggtagtttaacaaagtttttagattgtccaagagtttatcaaacccattatctattatggtaaagtctcgctgagtaggatgtttttaacttaggctactccaaaaagtaaagatagtagcaaatgtagatccaacttttcaggttatcttctacctcatgcactactctaagcagtctttgtttgttggaaagtctgattatttacagaagtcaagttttgttatgttctatctttttctgatctgtaaaaatgggtttgctagagaaagactaggagaaagcttttttatttttttcctttaaagggggtgtgtgaaagggtttctaagaggtataaaaaccttaggaagtttcatagtggtcctaactaaatcattacttttcagacatttgacagtaggcactccatgagagcaggaaaacaaggtgagtcctgaagttacccccactctctcactgcctgtaggaagattctgggccacagcaaaaagacgagataatcaaacgcagcctggcagtctttgtgagttgagaagacaaaaatcagaattcagagaagctatgggactaggatttatagggtaaaaaggaaggagcagagagagagcaagggagctcaagatctttagagtttggttccaagtctttggccaagtactgacatgtacatgcatgtatatgcatgagaggaaacaacttgagaccagggaaagctcacacaaagctgggaataattctttctccaatgaaccaaagtggaaagatctcataattaacagggcatgtgtagtcttcaaaagggtattgtgttggtggtgctgaattagacctggactaaagggtattcttgacccactgttagaaatattaaaggcaaacctggaaaaggagcaaactgattccaagtcacttaactgcttgccagaacaaagtctgacattctttgaaggaatacagcaaaatctagcacccaaaaatataaacattttaaggtctggcattgacttaaaaattactagcatgaaaagaacaagaaaaaaatgtaccctgtaacccagagaaaaagtaatcagtagaaacaagagtccaggaaattagagagatgatgtaatcaagcaaagatgttaaaatggcttttataaatacgcttgatagctcaagaatgtagaggaaaataatgaataagatgtagggataatgaatgctatgaaaaaaacggaatttattcatttacctcttttccctccctccctccctgtctctccccctctgtcccttccttccttccttccttccttccttccttccttccttccttccttccttccttccttccttcttcccttcccctccccttttccttttcctttcccctttccccttttttctccttttttggaggcaggtctctctctgttacacaggctagggtgcagtggagcgatcatagctcactgtaaccttgaactattggatcaagtgatcctcctgcttcaccctcccaagtagctaggactgcaaggatgcaccatgcctggccaattttttttttttttttttttttagagacagggtcttactatgttgcccaggctggtcttaaactcccagcctcaagccattctcctgccttcgtcccctgagttgctgggattatatgtgtgagccaccacacccagccccctaaatgtcatttctagagagaagaaaaatacagtatctgaaatgaaaaatacactggatgatattaactgcagcttattcacttcagaagaaaaaaatcagtgaatttgtaggcatagaaacagaaactatccaaaatgaagatcagaggacctccagcttctatctagggtgtggaaaactataaagaatgctgcttttggccaggcacggtggctcacgcctgtaatctcagcacgttgagaggccaaggaggacagatcatgagatcaagagatcgagaccagcctggccaacatggtgaaaccctgtctctactaaaaatacaaaaattagctgggtgtggtggcgcatgcatgtagtcccagctccttgggaggctgaggcaggagaatcgtttgaacccaggaggtggaggttgcagtgagccgagatcatgccactgtgccactgcactccaccctggcgacaatgagactctgtctcaaaaaaaaaaaagcctgataaactacaaacttttaacttttttgaacccttcaaagaggcccaagcacacagtttctgtaagtactgaggctgaactaaaacagcagagaactacctccgtcacaagcctaaggagtactaagcaatagcagtctgccactggggcaggggcaaaagcttgaggacagacccactctcaagcacaggtttatagcatctgttataagctgaggatgaaatactaacagaaaagttttacagcaccccagccacgtgctaaacactaggcacaacaggtgatcactagagggagtggaagcctctggtaaactcagagtcatcacagcaacagtcacaccaagctaaactcctaactgattgtctgaatttctcactctaaagtccttatatggaaagaggcatacccacttccaggcctaaatatactactgttctacccacagtatcctgcatccatcaaaattataagtcacacacataagcaagagaaaaacaaaacaaatactttcaagaggcaaaacagttaacaaaacaagactcagaggtggccctgttattggaactatcgaggcaaaacagttaacaaaacaaggctcagaggtggccctgttattggaactatcagacaaagatttgaaaatagctctggctaagatattgaaaggatctagtgggaaacatagcatgcatgaattaatggggaatttagctgatagatggaaataatgagtcaagttgaaatggtagtaataaaaaaaaaacagaggtaaataattcctttgtggtcatcagtagacaacccagttgctgaagaaatgggtgaacttgaatataggccagtataaattatccaaactaaaacacaaagagaaaaaaaatgaaaaaaaatcagagctgcaggacagtatcagtctaatatgtgtatgcttaaagtttcagaatgagagggataaataataatgcagaagaaatatttgaagagataatggccaagaatttcccaaaagcaatgaaagacatcaaaccatagatgcaagacttaagaaacagcaagaactcccctccacacacacacacacaccacacatattcccttagacatatttaaagtgctgaaaaccaaagatgagaaaatcttgaagacaaccagaggcagaaaaaaaaacacatcatgtatagaacaacaaagataaactacagcagacttctcttcagaaactttgcaggcaagatgatagtgatatctctaatgtattacaatttttaaaactgtgtcaacccggaattatttatctgttgaaaatattttcttaaaaaagaggataaagacttctagatatatgaaaatctgagaaaatccattcccagcagactacaataactgctggagtaagttcttcaagcagggggaatgtcactccagacagaaacttggatctgcaccaagactccgcaaacttttttcatagagagccagatattacatattttaggctttgtgggtcagacagtttctgtcacaactactcaactctgccattgtagcacaaaagcaactatgaacagtacataaacaagtgagcatggctgttttccagtaaaactttatttacaaaaacaggaagcaggccatgagtcatagtgtgccaacccatgatctatacaaagaaatgagagctccagaaatggtaataatgaaagtaaatataaaagacatacgtttcatccttttaaattacactgtgaaataactgtctaaagcaaaattagtacattatattgtcggttttataaaatatgtaacagtaatctaaaagatgggaggaaggatttaacatctgttaaagatgtatattgtaaactgagggcaatcgctaagaaattaaaaagaaatgtaacttatctaccaatagtggctattaaatggaatgctcaatctaaaagcaggctgagagctgggcatagtggctcatacctgtaatcccaacacttggggaggtgggaggattgcttgagggcaggagttccagaccagctggggcaacatagcaagactctgtctctccaaaaaaaaaaccaggtatagtcttagctacttgggcagctgacatgggaggatctcagcccaagagttcaaggttgcagtgagctgtgatcacgccattgcattccaccctgggtgacagaagaagaccctgtgtctttaaaaaaaaaaaaagaaaagaaaaaagaagtttgagaaagataaaagaacaaacaacaaatgagataaatagtagacgtgtaagaaaatggcagacttaaatccagccatatcagtaatataatgcaaattttcaaaatgaaacagagataccaagagatagaggaagcaagcatttggcttttttcattctctgttttccagtggtttttgcacataattttaagaatagggtcttcgctagatgaaaacatttaaatagtgaactacttaacatctgtttacacactgctaaccctggcgctcctttttactgaataaaaatggtttgcccttctttcccccgtgagcttcaaacaacaaccaagctatcttggttgttactaaagttactaaacttgggaccatcagacccaaggtgctcccctaaaaccactttgcccaaaccttagggaacaaggaataggcaggctaaagattatattcaaacatatctaccctttttcctctatgttacaaaatctaaaactctgttgaaattcattttagactgttcttttatgtttcgacttctcagctctctctaccaccttttctggatcttgcatactttctttggtgaatctttgtttttttcagttgtgaacagattatggctatgtatacaaagagatccagttacccattcattaatgctaagaagagtgacgccgttaaattttaatgaaatgaaaggcataaagaattttaaaacctctgaaagtatccaaaagtttcctttaaattctttgcctagaatctaatttttttctcttctaattaagactttgtccttaagcatgaatatttaagatatatatagtcaatatagtattgtataatatagtcaaatgtattttctagtcagtacatttcagttcaaaaataataactaaaatttaattaccccttgtttgtcactgttccacgcacttaagatgttaatacattttatcctcacaaaaaacccagtgaggtagaactatttttatccttgtttcacagatgaggcaactaagggacagagctgttagataataagcaacaaagtgggaatttaaacctggttagtctacatctagagtcttcgttcattaccattaccccatgccttctctctaatttactgttacagaatgttgggatttttttcttttcttccttccttcattttttccttccatccttcattcctcattcctccattcagcaaatattctattctgacacactgtgacctgaatttacttgtgtatccagttataatgagttaatatgtaagatttttattttgagttatgccttactcacaaatcaactttggattatgacccatcaagaagttgagactggcctttacctattttcaaactcaaacataggatggcagtaaattgcaatactggagacagctcaatgaaaattgaacatgtcatattttgtcctcatgtagcaagaaccatatttaagtcttagcaggccaggcatggtggctcacccctgtaatcccatcactttgagagactgaggtgggaggctgacttgaggccaggagttcaagaccagcctgggcaacataagagacccccatctctacaaaaatgttctaaaattaacctatgtgggtgtgtgtgcctgtagtcctagctacttggaaggctgaagcaggaggattgaacccaagagttcaaggctatcgagcgccactgcattccagcctggacaacagatcaagaccctgtcattcataaataaatgagaacataaaacacatgcatacagtcttagtagaacctaaatgggatttaaggctctcttctgggctttctccatgtgtttcaacaaaatgaaatagttaccatttgatggctatttatgtattttctttatacacaaagtgtacaaaatgtgcttcatttctatattacataggtagaggctgttgagtctcagtaaaaaatttcattgacattttgtttttcttaatctgaataggattaagtcttggtaattttaaatatactgacttcagtttgctgtattcagcaaatatattcacagctaaatgtctcaaaatgtattaaacaagtgtttacactttggttttataactgtacatcatctttattacaaaaatccctatatttttagcagcttatcctttttactatgtgcagtgtccaaattaatgttccaccagaagggtatgtcttattaatagcgaagagttgatgagcatatcaatttcatgggacattaaaagaaatcatttaatccacacttgccccacctcactctattttttaggtaaaaaaaactgaggtctagagaggtttaatgacttatgtatctcacatagctagttcacatcagagacagaaatagatcctcttgactcttatttccatgtttgtttcattccgttggcctgtttatgaccaaatagttgatgaatggtagcagttccattgactagtttctttccttctcttccagttcttgctgtcaggggaactggctaattaacaatcatttattatacactattttagagcacagttctcttaagctgtctctctgccttcatatggctttatgccatagatggaggcttggagtagaatctgtccctggcacgcaaacaacacaagtctggaattccagaccagtgttctctgaacaagtggcatctgccttctggtccctgggtgccataaaaaacagagttaaacactgaccttgcctggtaaggttatggtctaaattaaatagtcaaaatacaaaaaagatgtgaggtaataatgggatttagcaacagtgagcctaatgttctgcttatcattgtataatgcaagaaatttcttagacgagcattgatacaaggatttggtggaaacagagtcagtgtgtcagaaggagtaaattatttaagtgtgtgaatactgagatacattaatgtcaggaaggaaatgagatgccaaaagtagatgtatttgataatttgttccctctatcttcccccaaattatttggtgatgtgattgttacttgactttctttttctttgttttggagtaagtggagtaaatagggttaaggcattgaatgattatctcagtttatgtagtccttagaaagttgtaaaccattaaattattttaaatcgttttttaagaatgagataaacattaagacaccaaggtgacttgattatttttaaagagtacacattcatgatgggtttttttttttcctgaaaaacagctcccctagttctgtaatcttttgacttgctgtaaaaaatgaaaatgtctttatttctaaattctaaacaacatgtggttggggaaatgtggtgacattaagaaaaatactcatattctgaactttaggcaaagcaacagtgcaatacagatgtaaattatgttatcaaggacaatttagaatatacaactgttaagaaaagtgattccaaagtggaaattagattttgagctacctttaattatagtttacttcttttttttttttttttccttttttgagtcggagtcttgctatgtcaccacccaggctggagtacaatggctcgatctaggctcactgcaacctccaccttctgggttcaagagagtctcctgcctcagcctcccgagtagctgggaccacagttgtgcaccactacaccgagctaatttttgtatttttagtagagatggggtttcactatgttggctaggctggtcttgaactcctgacctcaggtgatccgcccactttagactcccaaagtgctgggattacaggcattagccaccgtgccaggcccagaatgttctggtcagtgactgaaattgatcaaaatgtatttatgtaattcttccccgttcattcatttagaattttttactacccacccacctcaccctctcaaattgaattgtgcattttaatgttctcttctggccattctaatgatggaaatgtaaactgttttctataaactttctcatcctcacctatttatatttaatttgcaaatctgatgttaaggggagagaagtggagagcatgaggaagggtagttgagttggtgaatgttttgcatcctagaatacttcatcacagatgttaaagtctcagaaagtcgtttcttttttttttttttctttgagacagtatctcactctgttgcttaggctggaattcagtggactcactgcagcctcgacttcctgggctcaggtgattctcccatctcagcccccctggtagctgggactacaggtgtgtaccaccatgcccagatgattttttgtattttttgtagagttgggtttttgccatgttgcccaggctggtctcgaactcctgggctcaagtgatccacagcctcagcctctcaaagtgctgggattacagatatgagccagtgcacccagcctagaaagtcatttataaagcctattcaaattgcccaggtctgactgtgtgcttttatcagggtaataggatgctccattggcattttagcacttctgccagaattattgattgggaagctgcttacagttctgatgcacatcacaggaagctggtgcaaaattaagatggcatatgtgatgagataaaggctgggttagaaaagtgattacaactgggaacttgctaatcactgacctctatagggatcctgtggtttatcactaatctcactcacacttggcattttcctatgctgctgcctcatcattcatagctgtgtgagtaatttggcatggagtgaacaagaggagggcatagagagtccagcagctgtgcctgttggcactagatatttaagcatcttcactgtagccagcagtgtggttggcacaaatgttagccaataatgcttaaacaaattgttgtgaagaaaataggcaagcatttatttaaaaatcccctttctcttttctttaaaaacaaaaaatctggtcaattaagatcctttttagattctttttctgtacatttgagcagattactaccaaaataaagtctataattctgacagtatcttctagacaagaatttctgaatagtttattaattaaactgtgcagggtctgtgtgaggtacatgttatttggttgattttcctaaaagagtgagtggggtcattgatgttaagcgacatgttactttcctagttgactcaatgagagcgaagcaagagctaagagacgaatccagtaatcagaattcccaggtctttgctctcatactctatggcattgcaggtttgcccactttgtaagttagcattttgtgtttctccagatggttagtatgattcaaattgtatgatattttaataggatttgcccacaaaagaggagcaggttctccacgagcaaaaaggttaggtaaataatgagttttcaaagacactcaagggggaggaggatagtctgctcataaaactgtcatcagatttagatttgtgcacaaatatttagatttgcctatgtaaggatttcatattgtttctctgaaaagtaaatatggaaaagctcacatgacttacacactgaaatatttcattttgaacatagtaatgttgatctcattaacttttttgaaacatccaggaattgtttctaggttaagcttttagcttttaagaaaaaccagtctaatacttaaattataacacatggagtttttctgtgtaaaatatgctgaattcaaatttatgaatgcaaatcagaatgtcttacaaaaatgaacagaaataatgttggcttccatacaaatagagaagctattctattttgtactgttgtgaaggcaacaattgtttcttgaatagtatctattcattgaaactaataaacttgtctggaaatttttaggtatttactggactgctgcagaaagaaatgctgagcaggctttatatgccataatatcattatctctgtctgtttcctcatcaatacattattttctattgataacaacagagcacacaccatgagagtattgtagaattgctttggtctaaatttgggtgttgaaggcagagtgaaactgaacaccattctccaagtgtggattgtggctaatctgctctgaggttgctaatgaagacatacctgggactgggtaatttttaaaggaaagaggtttaattgactcacagttcagcatggctggagaggcctcaggaaacttaaatcatggtggaaggagaagcaaacacatccttcttcacgtggtggcagcatggaaaagtgcagagcaaaggggggaaaagtcccttataaaaccatcagatctcatgagaactcaccatcataaggacagcatggaggtaaccacccccatggttcgattacctcccaccaggtccctcccacgacgtggggattatggaaactacagttctagatgagatttgggtgggcacacaaaccatatcaggcaccttctaacctttgcggtatttttagtaaatatatattatcaaatactagatttctgtcactaaaaagagctaaatgtctaacaaatgtagcagtacttctaaaacttggtcatccagtaggctataagctttttcattgtttggcacctattgagggtagagcttgtgggggtttttttgtttgtgttttgttttttgttttttgaggcagggtctcactctgtctcctaggctgaaatgcagtggcatgatcatagctcactgcggcctcaaactcccaggttcaagcagtcctcccacctcagtctcctgtgactacaggtatgcaccaccatgcccagctaagtttttttttttattttttataaaggtcagttctcactatgttgcccaggctggtcttgaactcctgagctctagcagtcctcccacctcagcctccctaagtgctgggattacaggcatgagccacagcacccggccagaagcttgtgtcttactcatctcctaacctcttcatctgtcagtgactagcccataaatgtttgatggaatgtatggatcttagattcttctgtccagtcaatgtttggatatttgtaattgagatggggagaaatgggaatgtagaactgtgcctgtccactcccaccttcactgtgactgccgattgtatcttatgtcaaaagaatagcattagtttgtatttctgtaagcattgaaaggttataacttaagtatattagtggtagagagcaagataacttttttttaagtctgagaatatttgttagggtaactaatgcctctaagagtttatgagtctggagaaaataatttcttgaacttcagtcatttgctgtttcttgaataaatgttttaaatactgtataaattagtcagaattatctgtcatttcttgagcaatttttagtttaggtcagaaaatgctgaatgtagttaatgtaaaccatgtaagtttagctacttaaaatacctttgcacacaagttatgtgtctgatggtttaatatacatatatatgtcttattcttgtatattttccaataatatgttgctattctactagagttgggtttcttaacctggagtccagagaatcccaggacagaaggaaaatcagtgaacttgaatgggaaaaaattgtcatctttatttttaccaatctctaagtgaaatttagcatggccttccattttgaatacggataacaaaataatccagacagtacctacagtttttgtcacagtagaacaatagatattttcatatcataattgttgcagatatcttaagctattatttatgctttcaaattattattagtcctgctgctaaatcttattaatgtgttaataaattacaggaaatgtgaggtttttaaaagaacattttgatgattacgtgtcattgtacattaaaatacttacattttgttttgtacatttataatcgtgattctgagaagtccgcccaagaggcccatgcacatgtgcacacaccgatacctatacacactcacacccccgcaacacaagagtgtagtaaaaaccctgtattagactatcccagagaattctttgtaataattttttcataggtgcttcaaggaaaattagatatatgttacattactagtagttcttaaactgttttcagctgaagttgactggttaaaattgtctatacttcatttatgtatatttatgttaaaaaaaaaaaaggttggtagaaacccttaatacagtagccagagatttttgttgtcagatgcctgagataaaagaaagataatgtatatgattaattttaattcatgaaaatagttcttgtgaaaagtaattttgaaagaattaaaaatgaatgcctcctaagtcttagactgagtatgcattattttatttcaaggatactcaaacttataagtccttaagaaaataactagtttctaataaatgaaaggtgaaataaaaatgtatttacagttcaaaatcttatttgaatagattaagtatcattttgaaaataagctatcaactttcatttcagaagaaacttttactttgtaacatcttcagcttatgttaaattagttttcattctctttgaattcaatgtcctttatgaaaggataaggaattttaataagcacaggaaagtaagtttaaaactttaggttttttaaaatgatctatcatatgggtagcctcgacacagataattaagattgtatttaaaagctgtacattattaaaaacagagctaatattcacctttaaccttgttcctttttccacttcaactttttttttttaaagagttcttactaggacatttgattcaaaatacaatacagtattaacttgtgatggagtgtggtggctcacgcctgtaatcccagcactttgagaggccgaggtgggcagatcacgaggtcaggagttcgagaccagcctggccaacatagtgaaaccctatctcgactgaaaacacaaaaatttgccgggtgtggtggcacgcccctgtagtcccagctacttgggaggctgaggcaggagaatcactccaacccaggaggtggaggttgcagtgagccgagaccatgccattgcactccagcctgggtgacagagtgagactcagtctcaaaaaaaataaaaaataaaaaatgtagttcactaattaaaaaaactctacaggtgaataggatgttcaaaattgtttattgatatgatacataattatttttaaaaaccttagaaatagactagtatcattttcattaaagtatacatgtcatgctgactaattgacgtagaagttttacaactctaaatctgacatctgttaaccctttagatatgcaaaataatccttgaaataataatgctaggccaccgtggtagctcatacctgtaacgtcaacactttggaaggctgaggtaggagggttgcttgagcccaggagtttgagaccagcctaggccatactatgagaccctgtctctactgaaactgaaattttagaaaattaggcgtgttggcaaacacctatggttccagctacttgggaggctgaggtgggaggattgcttgagcccagaagttggaggctgcagtgagctgtaattatgtaactgtgctctagcctgtacgacagagcgagaccttgtctcaaaataaataaatgaattaattcaataaaactagttactacaaaataaaaccattaaaggattgtacacttgcaattctgacatacacagccttccctgcatgtaatcaaaatggatcagaaatcttcttggaacaagaagatggcagagactgaagggaactgccaacttagaatgactggcatagaaggaattactgaaactcagggaaggtaattgtgttcttctttggcaggtccggtttctaaatagatagggaatttcagagaacaacttcattctgtgctttgcaaaaaacagaagattgtggggaggggtctggtggagagggcatgacttagagagaccttgaggctgctgcttcaatccagcatgtcaaagcaccatgtttgggggccttagttactgagcctcaaaaataccacatttgcaaattcatttagtatattgaatacaaatgagtgagtaccctactgttaattgttaacgctgtgagacttaacctccattctccctcaagaactggcccatactattactgatacttggccatgaaagttttgaactgtgggtgtattagttcgttctcacgctgctaataaagacataacccaagactgtgtaatttataaaggaaagaggtttaattgactcacagttcaacatggctggggagacctcaggaaacttacagtcatggcagaaggggaagcaaaagtgtcctccttcacatggcagcagcaaggagaagtaccgagcaaaaggggaaaaaccccttataaaatcatcagatcttgtgagaactcactatcataagaacagcagcatgggggtaaccgcctccatgattcagttacctcccaccaggtccctcccacgacatgtcgggattatgggatctacaattcagggtgagatttgggtgaggacacagccaaaccgtatcagtgggtatagtcacaataagaatttttttttcttttttgttttttgttttgagacgagtctcaccctgtcacccaggctggagtacaatggcacgatcttggctgaccacaacctctgcctcctgggttcaaatgattctcttgcctcagcttctcgagtagctgggctaacaggcgtgtgccaccacacttggctaatttttgtatttatagtagagatgaggtttcaccattttggccacgctggtcttgaactcctgacctcaggttatccgcccgcctcggcctcccaaagtgctgggattgcaggcgtgagccactgccccccaccacagcaagaattcttacatgttgctgggaagaatataaatgggcgtggtgacttctgagaataataaggcaatcaatgcctataaagctgaaagttcgcatcctttaatctaccagtttcccttctttgtgtctatcctgaaggaatgtatgtctgtgtgtgtgtgtgtgtgtgtgtgtgtgtgcgtacacgagatgtgcaaggatatttgtttcaatattgctcatgacaaaaaaatataaaaactatctttccgtagggaaatatataaactggttttatttgtataatggaatattgtatagcagtaaagatgctcaaactagggatctgttatcaacacacagctcaaaaacataatatatggaaatacaggtttcaagataaaaaccatgtaattccatctgtttaaatatattaaatgcaaacagtaatgtatattgttcgagaacatgaatatatatttaagagtataaaacatacatggtaatcatgcacatcattattatgataatggttatccagaggtgtggtttgagctatgtctatactgtattaatttttttttttttttgaggcggagtcttgttctgtcacccaggctagagtgcagtgttgtgatcttggctcactgcaacctccgcctcctgggttcaagtgattctcctgcctcagcctcctgagtagctgggactacaggcgcataccaccatgcctggctaattttttgtatttttagtagagacagggtttcaccttgttagccaggattgtcttgatctccttacctcgtgatccgcccgccttcgcctcccaaagtgctgggattacaggcgtgagccactgtgcctggcccaatactgtattaatttttgagagagaaagaagagaagaaggttcagtctgaagcaaacatgggaaaacattctaactagtgggtacatgtatcatattgttggctatataaatgtctttcattcttttaaatgtgttttaaaatactatacgttgaaaataaagtatttacatgctactttatatagctcaagtgatcctcccacctcagcctcctgagtagctgggaatacaggcatatatcaccatgctaattttttattttttgtagagaggcttcactattgcccacgctagtcttgagctactggactaaagcagtcctcccacctcagcctcccaaagtgctgagattacagacgtgagtcactacatcctgcccagaatttgactcagactgactgaagtgatagcaagttttacaaattattgaattgtatcctcttatttctaatttgttctttctattttaaaactgcaatataattaccatgaatagtctagcagtttgattgtctgtcaataaatgaagggttttatataaagttaatttctttgttttataggaaaaacatcagagagaggctcattttccctgtacagcagagatactggattaccaggctgtcaagtaagtttaatgattaaaaaaagcaatgagatggtttttaaacacataaataaaggctctattaatagatgagatagaaattatccaatttatttcactactgtttgtttaatttgtaactaagtgttgttttttgctctctttgcttaaaattgtttcagttccccagtttaccaggctgtctttatcatcaaagattttcataacccacctccattttaactggaaacaaagctaccgctttccaaaatgcttgtcatttctgagaaatttttttgcatattttctcacagaaaacgtaattggtggtacataaagaatatatgattgatctgcatagcttaaatatcctgtaatgtcaaactgatcattaatattggaagtattttgttttcaatcctgcatgtaaccaatttttaggcttcacaccctccctgacttggaatctttgtttcaactctcccaccttctctagcattttgtgcttctgctaatgggcatcttttctgcctttttcctcatatctttagactgagaatcctgaacacacaattcacctgcagattcccatcagaatcaagccaaaaagaatagaaaggaaaggcagaacatattaaatttgttttctgccatctgcatgctctacatgagggcccaccctaatttcaggcatgggcatgtgagccggttttaactgccatgctaataatactccatttaatacatatttcataattgtgcctctaagagagttttacataacatcctgttttgtgatatgccttcccattataaaataatgtattgtagtaggctggccacggtggctcacgcctgtaatcccaatactttgggagactgaggtaggagaatcacttgagctcaagagtttgagaccaacctgggcaacatagtgagaccttgtctctacttaaaatgtaaaaatcagccaggtgtagtggtgcatgcctgtagtctcagctgcttgggaggctgaagcaggaggatcacttgagcccaggagttgaaggctgcagtgacccatgattgcaccactgctctccaaccagggtgacagtaagactctgtctcaaaaagagagagagagaaaggagggaaggagggaagagaaggaagggagaaggaaaggaagaaagagagagagaaaataaatatattgtaaaaattcaggatcatatattcccatgtccttaatggcaaataggcatggtctgaataagtgatttgttaaatatcatagatttgggggtagttactggaccaacactcagatttcttggcttcagaccaagcagtcttactctattttcatccaagtgattttttaaagttttagtgttgttaatgattgctctattttccgtttatggttagctttattttattctagtcatttaaaatatatatagattagcattgtgtcatagccagtgttttgccttaccagctcttactagctgacaagagccgaatctgttaaacttttaggaatttagcaagtatggttgacatcacactgatatcttaaaattggctattatgagctgggcactgtggtttatacttgtagtcccagctacttggaaagccaaagcagaaggatcacttcagctcagtagtacaagtccagcctgggcaatgtagccagattgcatctctaaaaaaaaataaataaaaacaagcaaaacaatggccatcaaggaagtatttacactgcactgtggaaattcaaaaatgttacaattcagggcttccatttttttaaacagttgttaaacatttaccagcataccgctcatgcctagttaaaaattgcagagaaccacagaatataagtgcttattcagatcacagtaaaaaatagaaaagcagcaattgaacatctagcccccattaaggtatctttctgacctttttcaaaggtaacagtgctttaaggccaaccaagatacacaatttattctgtatagttttagcaatatccattgatgaaaaccaaaatatcctcttttttggtccatatcaaatgtggattggtgattgtaatatttctgcaattcatagttgatatcagaactcattcttttttatgatacaagttactgtttgaatttcatagtctgaattttagttcataaatgacttggattggaggccgtggatctaatttctgatcttggctatagtactcattttgagagttttgtaggccacctaaccatcattcttctgaatctcttcagagtacaacaaaatttgaaaaactaagttgtggccaggcgcggtggctcacacctgtaatcccagcactttgggaggaggccaaggcgggcggattgcctgaggtcaggagtttgagaccagcctggccagcatggtgaaaccccatctctactaagcatacaaaaattagccgggcgtggtggcaggctcctgtaatcccagctacttgggaagctgaggcaggagaatcgctggaacccgggaggcagaggttgcagtgagctgagattgcaccattgcactccaatctgggcaacagagggagattctgtctcaaaaataaataaataaataaataaccaaactaagttacatcatttggacaatgaatgattgataaaagtaactacaaagaatcctgtaggtttaagcttctaagctgtgcaaactgcctctgtgacatatcattaagctaacttgtctgccaccctgcttcagggccttaaaagtcttttcgtcttcatcttaaatctaagatagcagcttagttaggcagtattgaatcttacatgtattctcataagaatacctcataaccataacaaatttgtttaattatcagatatatgaaagtgcttttctcagttcctaatcatacagtagaaggtcagtaaatgtcagttgaggggggtaagacagaggtttagagtgaagagacctaggttcaagtcccatctctgcactgatttctatctgaaagataggattagccatttctgcttctgcctacttagtagatctctgaaggttaaactgtatgggcttatgaaaacatttcaaaaaataaataaataattttaaagttctcaattcatgtaatccacataacaaaagatattttggatctttaatattatttttaagagacctaaatgtttgagagccactgggctaatgttaacattactgctaaacttgaggggggagaaaacactattgtaagctttttgagaccacagctaagtctaataaatcatagttcatgcttatattaatgtttttattatgttcaaatgttttcacttacgtatttataccctcttggcaaaggtattgctgtttagttagagtcagcaataagttctattaatgtaattgtccagttttgcaaaggtgaatcttaacagtttttaccaaggattaatgtgcatttgtaccacatttaattctcatatcaaaagacatttattttaaacctaaatgtgtagcgctctaataaaatttgctaccatttgctgagcactaactgaaccagccattgaactaaacataatcacatttaattcttttaacaacaactcattttgcagattagtaaacagaggttctcctaaggtattatgcttaaggctacatatctagcaagtggtaaacttaaactcatgcttgagtgttttgactatatgactatacttcagcataggaatccatcagatttcaactccgtgcccttattaccttccttcatttttatttgtttgagaaggagacagggaattaaaaattttttttttttttgaggcaaggtttcactctgtcacccaggctggagtacagtggcgctcacaagacctcctgggctcaagggatgtaaggtttagagtcaagagacctaggttcaagtctcatctctacattgatttcttcatctgaaagataagcagtttctgcttccacctatgtagtaggtctctgaaacttaaagtgtatgcgcttgtgaaaacatttcaaaaaataaatacataatattaaatttctaaattcatgtggcccacataacaaaaggttatttgggtcttcatatacctccctgagtagctgggactgcaggcatgcagccgccatgccctgctaattttatatatatatataatatatatattatataaaatatatatatataatatattatatatatatatatatatatatatataatatatatattatatattatatatatatatatatatattatatattatatatatattatatataatatatatataatatatatatattttttttttttttttttttagagatggggtctcactgtgttgcccaggctggtctcaaattcctaggctcaagcaattttcctgcctcatcctgacaaagtgctgtgattacagacaagggccaccactcccagaggaaatttaaatttttaacaaatgtccaggtgattttgattcacatggactagagttcatgctttaagaaacccaactcctctgtgtatgccaactcctctgtgtaagccaataggagttatccttggaggaaactatatgattactgtttagcaaacagtttataaacattttggagagatcaggaaggcctatggaaaagagaagaacaaggctactagaatgtttgatacaaaataacaatattgctatatacaagatttaaagatattcagatgagagaaagatacctttttttttttaagaattcataggagcagttcgtgagccccagagaggaagcccaaaattcagcagagtggaaagattattctgcagcaaggataaactattcaaaggaaaacatgtattccagacagtatttattataatgagtcagaggagggacaaaaaatatactttaactaactggctgccattttgtcttacctattcacaagcgacaaaaaaaatccaaggaaatataaatagtgactccaaaattatacccaaacaccacattaaaaccatttttcttcaacagaattccccaaggagcattaactctgctattaatgtacataaaatgctgctgacatactgcaaaattcagactaatttaataatgcctgatgggccttacttcatgttaagatgatgtaataatatgttgctaaatgagtgtcatcatattacattcacaacaatcacattaactgatgagccattaaaaggaaactcatgtggcagtattactggaaacactgatagatcattctgcagttaaatttttttattgatgaaacacagagcatagaagccagtgtctttattaataataggtatatcactttaaaaactaccacagttaagtgaaaaatccttttatcagtataacaaagtttttcatttatacctcttaagcaagtatttattcacatagtttcataagtttttctctaagtgtttaaatgtagaaggtggcagggtcttggtttttttcagaaagtgtgaagttcatctgagttcagatattatacccttgaaaaaatgacagctttaaaaactgtaccttacttaactcttagttgtttggagataagcttataccatttggtttttccttgttcttttttcctgttatacccaatctcatatgcagacatttataataataaaataataaaagagttgatgtatcagaaagacataacaatgacagatgtgtatacgcctaataagaaagcttcaaaacgaagcaaaacaaaaattgatagaattaaagagagagataaacaaattgacaatcatgcttggaaaattgaatacttctgtcttagcagtttgcagaataactagacaaaaaacttagtaaagatgtagaacaaaattaactatcgacaaccttgacctaaatgatatgtatagaactctgcatacaacaactgaagaacataaattcctttcaggggcacacattacactaacaggctggaatcatacgctggtccataaaactagtgtcagtaaattggaaaggtttgaaaccatacagagtatgttctctggacacaaaagacttaaataaaaactctgatgagaactcagggacacaaagaaggcacctgtagacacgggggcctccttgaaggtagagggtgggaggagggagaggatcagaaaaaatagctattgggtgctaggcttacttcttgggtgatgaaataacgtgtacaaacctccccgacacgagtttacctatataacaaagctgaacatgtgcctctgaatctaaaatacaagtttagtaaaaagcaaagttgtattagaagtcagtaagactaggtgtggtgactcatgcctgtaaccccagccctttggaaggccgattcaggaggatcacttgagcccaggagttcaagaccagactgagcagcatagttagactctgtctctattaaaattaaaaaaaaaaaaaagaaaactagtcaggtgtggtggcaggaggctgaggcgggaggattgcttgagcccaggagttcgaggctgcagtgcgctgttattgcactgctgcactccagcctgggcaacagagcaagactctgtctcaaaaaccaatgtcagtaagatatctagaaaaacaccagatgttcagaagttaagcaacatgtttaaatgacccattgttttaaaaagaaaccacaggaaattcagaagatatttctaactgaataataatgaaaatgtgatataacaaaatgtgttggtgcatctaaaccagtgccttgaaggaaagtatacttttgaaagcttgtattagaaaagatgtacagtgaatgaccaagattctgccctaagaacttagctagaaaaagaaacacaaagtaaacccaaaataaatagaaagaaggaaatactacaaataagagcagaaatcaatgtaatagaaaaaactaacaaaaccaaaatttggctatttgaaataaatcataaagttaacccctagctagaccagttaacacaaggggaaggagaagagaacaagaacacaaattaccagaatctggaatgaaagagaggttactgctatgaatcatatatacattaagaatataataaatattataacttagtaaatttgacaacttagattaaataaatgaattccttgaaaaatacttaccaagaggagacaaattgaaacaaaatctgaatccatgtatatctttttttctttttttttttttagacagagtctcactctgttacccatgctggagtgaagtggtgctatctcggctcactacatcctccgcctcccaggttcgagtgattctcctgccttagcctcctgagtagctgggactacaggtgcccgccaccacgcctggctaatttttgtatttttagtagagatggggtttcaccatattggccaggcgggtctcaaacccctgaccttgtgatccccccgcctcagcctctcaaagtgctggaattacaggcgtgagccactgcacccggcctgtatatctattaatgaaagttaattcatatcaaaaaccttcccacaaagaaagcataagggtcatatggcttctttcaaaatgattaattctttcaaatgcttaggaaaaaaataataccaattttatacaagttagtttagaaaacagaggaagagtgaacatttctcagctctttttatcaggtgagcaacatcccagtaatactcaaacaacacgtgtggtttgtaggagaagtgaaagtttggtttaagatttgaaaatccatgtatttagttcaccacattataacagaatcaagaagaaaaacaatgtgatcatttccatagatacagaaaagatatttgacaaaattgaatactcatgataaaatctctcagcaagctaatagaaggtagcttcctcaatttgataaaagacaaacatgaaaaaaatctatggctaacagaatacttagtgatgaaagactaaatgcttcccacctaatgtcagcaccaaggtaataatttttgttctcatcattttatgttttggccagtgtatgaggacaagaaataaggttatagaaattgaaaaggagtaagttgaatttgctgatgacgtgtttgtgtacataggaaatcctaaggaatcatcaagaaaacttctaaaactaaatagtacttttagctatatcacaggatacaaagtcaatctaaaaaattaattgtatttctgtacactatcagcaaaaattagaaaataaaattaacagaatagtactgcttatagtagtatccaaaagcgtgaaatactgagggaagaatgtaacagaagatggcaaagcttcaacagtgaaaactcaaacatctgttggaaggcttactgtcacttagatgttagttcttcctaaattgggttatagatttcaaggccaccctgggcaacatagcaagaccctgtctctttaggggaagaaaacaaaacaaaaactaaaagacttctgcttatcaaaagacataggttaaaaaaaaaataaatcggtaagccacagtctagaagtccagtatttgcaaaacatatttaacaaaggactgatatacaggatatataaagcattccaggctgaggcaggaggattgtttgaggccaggagttcaaattgcctgggcaacttagcaagattcccatctctacaaaaaaatttaaaaattaactgcaggtggtggtgtgcccctgtagtcctagctactcaggaagctgatcactcaagtgattgaggggtatcacttgagcccaggagtttgaggttacagtgagctgtgatcatgctgcttcactccagcctgggtgacagagcgagatcttgtgtcttaaaaaaaagaattcctacaactctgtaaggttagctaaggcttctacagtttttctctttgtaacaggaggtttaagtacagtgaattagcaagtttccagtcccttctagacttatgttgtatggtaatgtcaagaacaagatcatttccactttgtaacaagattacactggcctgctgtttcgccaacaggattaattaaaactagttgtcttaaacagcaattttgatctttgtttatgtaacaacaaacctaatagtagcctcagtcttgggcagaattattagaaatgtaatatttagaacaagaaagttgatactgtattgtattctgagcaaacctgtttcagaacaggcataagtaaaccaactcattcagagaactaagaagttagttactcaaataacatgaagagcatcttttaagtgtttgaagcataattcgacttttctataactttgaaggttaaaaagttggacaataggtagaaattaagcattccagatttcagcttaattttaaaaagaaatgttgtcatgtgttgagctgttaatggcgtagaatattaaaccttggtagataaatgcctttctcccactggatgtttccaagcagagggtagacatctactttactggtattttataatagattacagtacctattgtttgactgaaataaaagaccttaaaaggggcatggtgttgcatgcctgtattcccactcctctggaggctgaggcaggaggattgtttgagcccaggagttcaaggttacagtgagctataatcgcatcattgcactccagcctaggtgacagaatgaaaccctgtctctagagaaaaagaaatagaagaccttaaaatgttcctcaattccgtgagctctctagtgacaagtaaaaggctttccaaatggtgttgatgatccatctgaggttggtgaccagaaattactgttgacactaacctgtatgattgtgtatgtgcttcaacttttattctaatactacccagcaaactacatgtataagcacagacagcaaatggttgaatcaatatagtgatcaggattgcaggccagttagctaggttaacaatgatgatactacataataactagcatgtatcagtcacttgaccctataagcataatttcatttggtccccgccatactcaagtggtgatattgttgctgctgttgcgtctgttattattattcctcccatttgatagctgaggaacctgaagcctcaagaagttatataattcacccaagatttcatagctggtaaatattagaaggataggagaattgatgtagtgataagagaatagttgaagtactagaccaggtttcaaaggaaggaaatgaagccatgattaaactttgtgactggaaaaaaggtcaagatattggttgttatgcagtgaaagagcaggtgcagtaagtaataagggaatgatggcactataagaaaaggaggttatgtcaaagagttgaatattggacttacagatttcacaagtcaagtggtttccagggctaacaatctagtcctcctttggggagtagattggtgatttagggaattgttggagtcacgaagattaagaagacgtaagactagctcttggattgatgtggaagctatccagagatgattgactcataaggtagcatgtgaaaggggcctacatgcacactagttggcacacagtaggcattgagaaaatgttgtttgaatctgaaccatgtgatctaggaaagagtatataagtaaggctaacaagccatcagctgcctgcagagtgatgtgcattttgtgggttgtttggaacataggtaaataaattgttttgtggaaagaaagtctgatcttggagtatcaggcaatagacaattttttttttttttttttttgagatggagtcttgctcttgtcacccaggctggagtacaatggcatgatcttggctccctgcaacctctgcctcccaggttcaagcagttcttctgccacagcctcctgagtagctcggattacaggtgccccccatcacacccagataactttttgtattttcggtagagagggggtttcaccatgttggccaggctgctctcgaactcctgacctcaggtgatccacctgactcagcctctcaaagtgttgggattacaggcgtgagccactgtgcccagtcaatagacacttttaatgtcctatttttgttaaaaggccagagagagagagagagagagagagagagagttggattaggcagggcctacttggcagggaaaaaacttcattcattctttcttttatttttattttatttacttatttatttatttatttatttattttgtgaaacagatctcgctctgtcacccagggcggagtgcagtggcgtgatcacagctcactgcagccttgacctcccaggtttgggtaattcactgcagcctcctgggactacaggcatgtgccaccacagtcggctaatttttatattttttaggtagagatggggttttgccatgttgcccaggctgcattcattgtttctttctttctgttctctccatgaaaattgatgattatacttttgatgatacttagtgctcgttggaagcagtttcagaaagtccgtttattctttcgtaaacttatttcaggagaaaagagcctgttaaataatgggtagagatttgatgccatctcaaaacagaaaaaagaggtgacaacatactggctattacatgataagggattattgtcaattttggagcatgtaacaaggggtaggagatggcagaacaaatgaagccggaacaacagaatgttgacagctgtcatagctgggtgataggtacatgaaggttaattgtacttttttttcctacttttgtgtattatgaaatgttctaaactaagaagtttaatgttttgaagacgtccagtacgtaatgtttcattttataaagtatggcatgcctaactatatgtctaatgctatattgggtttttttactcttaattatacttacaaaaatacaaggaattgagaagagaggatacttagttgctccatgttaaagctagtattaaagagaaaaagagtggcttcaaagtattagaactcttctgaaaatagtagtgctacttaacaccatttccacgaataccaaagagaaataagatttcatctcctgttcttctaatgttagcacctcacacagctggcttctttgtattcattaaagaaaaggcgcaaaggcatactggtaacacataggagaacattcagttagccctttttaataagagagttgtaaattcaggcattcagaaaaactactcactttgaagtagacatgcttagagtatgctcactactaacctcacaagactgccttcaaaaaatcccctatagcatttttggaagttggactttttatggaagcctatacattcctaaaggaaagtcattcttattccatatttgtaattattcaaatattgcatatattaaaatgacatttagcttgttctcttcatatttcttttatttctaagaagtctgtctgtattgatctacatcccggatctctctactgtgatatcttctcattggctgataaaagatttgggagggaagttgagaaaaaaaaaaattagtgaaaaagaaaaattaagatggtaaaatttcctattgcgactaataattaaagaagattaggaaactgaaactactagattgtcacgttttagcactgtaatattacatgcatagtttattttctttttttgtgctagaaagactgggctgattgactgggcacgggactcatgcctgtaatcccagcattttgggaggctgaggcaggcggatcaagaggtcaggagtgcaagaccagcctggccagcatagtgaaaccccatctctactagaaatacaaaaaaaattagtcaagcatgatggtgtgcacctgtagtcccagctactcgggaggctgagacaggagaattgcttgaacccaggaggtggaggctgcagtgagcaggagaattgcttgagcctgggagacagaggctgcactgagccaagatcgtgccattgcactccatcctgggcgacacagcaagactccatctcaaaagaaatttttttttttttaaagattgggctgatttcgttggcaggatacatttgatggatgactgtcatcttctcaaacttgcatgacactttatagacaatatttattaagttttcaagaggatatgttgagattataaaatttgggatttgtaaaagaaccagtgtaaaagttggctagtggtggctggtggttttttattgacctaggaaaggattagaagcatctcaggttttctttcactttgtttttctgtttccccccttcttcctcccccaaattaatatattgtccaaagtgttcataatgacttggaactattcaggttgcacaaagcatttaatgaaatcttgtcttagacaaaacactagagaggatcataattaatgtctcattttctgccagttgctattgattactcattcaagatccctttgttctcagaatgataactgtagtttgcatcactatctaatgagattctcaggatagaattctttaacaacatgctgataattgctaacatatccctgaaatttcaatgtaaatgaatttgcatcataatacaattattttacaaatggcgatattttccaaatttgaaatgtgttagtttttttaatcatttgtagaaaattaacagaagactgacatattattaaagcccaacatttattttttgccctgagttgccctcacccttcgattttgatttgattatgacttggggtgagagacttctttatcattcttgggttactctgtcataatctctgaaacttcaaatggatttacagctaaaacacaatgatttttcgaaattagaacaacaactgcaaatatggtaatactataataattctccttttagaacaattttgtttcttgatccctcagtgacaaaagaaacacgtggtactatagcataaagaatctgcgaaatcataacagtttatgtattctgttataattgtgttttatacctttctattcctttaatttccacatactccctcccccaaaaaataaatcttttgaacagctgcttgcctttatgtatttaaaactgcataccacttcaggggtgtaagataggcttgaaattaaggaattctgtagaataataacacagcagaggttccatgaattcatatcagtattttaaatttttggagatatgtgactataacatatgaggtactctccatctaattttcttaaataaattaataggtagtacttccaaattttaatcataaaatgatgctaataattttttttttttttttttttttttttgagatggagtctcgctctgtcgcccaggctggagtgcagtggtgtgatctcggctcactgcaagctccgcctcccaggttcccgccattctcctgcctcagcctcctgagtggctgggactacaggcacccgccaccacgcccgcctaattttttgtatttttagtggagacagggtttcactgtgttagccaggatagtctcaatctcctgacctcgtgatccgcccgcctcggtctcccaaagtgctgggattacaggcgtgagccaccacgcctggccgatgctaataatttttgacctacggttaattaggcccttatttgatgtgaagttatgagtggcttggcgtttaagccaagccacttaataaaacccagttccgacaaagtaagcctgtttttcaacacttaattttccctttctgttttttttattttttattttttggtctcactgtgttcccccgactgacctcaaactccgaggcttaagcagtcctcctgcctcaccctaccaagtagctgtaactacaggtgcacatcactgtgcctagtttattttcccttttgagaataaagaatatccaaattatagcagtatgattctgaatcctcctagcttactgagcagcaccattttacataggatattcttctgcctccctacaaaatcatatttagagtaccttctaatataattaacaagagttcccattaaaaaaaggatgttggccaagtctacctactactttattcctttcatttactttttgtttattatcaccaccaaagcttacactcatcaagttcacatctggaaattaagctgtttcttacagatgaagagggagaaaaaacttaaaatacatgtatcacataggctgttaaagttccttatttttaaaaattggaaattttgttcacaggctagaggtttgtcatatgtaattcaaaatataacttacttattgtagattttatcccataacctagggcagtcatctaggctgcgttagtgttttgggggataaccctttattaattattctctagtattagatatatttttcacagagaaaaatgtctggatgactgtatctatattttagatatatgtatttctataaaagatagtctagatgactataaaaaagattattttccaagaatatgttaagaaattcatactatgtaatttcagaatactaattctttcttgaataagatagctcggcacaataaaactgctttgcctagttctatatcctctgggatcgttctgtattctttttgccggagatacctccaggacaagatcagtagtaatcaataatgcttctcatttgttttaggaagacagaaaaatcaataatatgagctgatacctaattttattttaggagaagaaaaataaaatagttgatgtgtgtttcagtgttgcctaaatgtttgaagaatcaaataaagaaaaatatattattttattagtgttagaatatcaaaatcttaggcttttatagtttagcacttgattttttaattgtatttttttcattgttttgttaaatattattttgtagactgtcaagtccttgtggacaaaattttgtcttaaactttttgtatttcttaagagtactgaagaattcattttaattaacaggataaaatatggtcttgtattcttaaaaagaaacaattttttctatatttactttgcctcatcttatggatcatgatacagactaaacacaggaaaatggttatttctgtgattaggacagctgaaagaagtgtaacctgtgcatcttttttggcattaatattcactgtggaacaagaagacagggcatttcctaaccacatatccagatttgtctatagtgaggaaaaaggtttatcaacactaaaactggtagctagtaaacttgttttttccaaaaaaatttgttctcctttttttctttctttactattgcatagataaaaaatctgccaatatgtgttctatagtcatctcagccttaggattgtaatccacaaattcatttataaatcacttacatgttttcaagttaacaatcttagaaatgatgcatgttcccgagttactatggaagtcttgttgtattgaggaaagggctttctgagcagacctagattcaaattaggatttcactacttgttatcactttaatatgtgaaatctatataatacttaagattgctataaatcctaaatgagatagtacatttgaaagtgtattagggagtcctcaatattttattcttctttgctccaactttttattttgaaaagttaccaacccacagaagaggttgaagaataatacaatgaacacccatgtgaacttcatcaagagtcatcagttaacatttcaccacatttgtatatacacattccttttctttctactcattctgcgtgtatgaatatatgtttgtgtgctgcttatgactttatatacacaaatgcacacacttttgctaaatcatttgagaataagttgacattttcctatttattcttgatcttaattgatactgcttgaatctgtcacaccctctttggatttagcatctgtcaatcctctctagggatctgtcatttctgcccctattctcttgcgtatttccaacatcctttcttaccatagccattgggaattgtaacccagtcagcttggattcagggcagacaaggtctcctgaaatcttagatcacttacttaagacaaaaggtttatgcccaggaaacagaataaaaatatcattcgtctcatttattttgtaatatttagaatgtagtgagttaatggggaaagaaaaaatgaaactgagttttttgtattaactagggccaataactgtgctgtacacttttatttttaggccttgtttacttcccccaacaaccttgtgagctgtttgtagaagagggaaacagactcattaatgttagataatttgttcaagattaccagtcaggatttggactcgggatacctaactccaaaaccagtgctgtttccagaacatgagtatttgtgtagattttcagtgtacttttagaaatataggaaatacacttcctgttcatcatttagattatttctttcctctctcagcccttattatgactactatttgatttctttgaagaaataattcactggctaacttttactcatctgaaagtttatgtttaccttattaagcaaacagacttgtcttcaccaccctgcagacttagtcctttgtccctctgacgtattagattagcagccaaaaaaaaaaaagttctataaagggccagataacaaatattttaggttttaacagaccatacgttttctgttgcaacactgaacgcttaacactgttgcatgaaaacagccatagccaatacataaatgaattgtgtttcatttgagactgtttttcaagaaaagtattttcaaaaacagacccactttctcctctaagctctggttttttgacccctaatataaatcactctcttatattcccataagaatttgtatgccagggaatgttagtgtaagggacactgttgagagacatacacacatccctccttctgatatatttgtttgtgtgtatgttatgaccagcttcatatgtgccttccccatgagaaaatgcagatgaagtaataaatgcagcaggtacctcaaaacatatcaatgaaagtcagtttggcactgagcaggaaaaatcctgttgaaataccaatgatatttaaaggaaactttaaggtacttgacccctgcccttaagcatgtggtaataatatgttccatctagtgtactacgagccatattctgatcttgccatttaagcaatattgaatgtgcccagcctgagcaaaataaaagaaggaaattcaaaacagatgtgacaatggaaatttcagtataacatctatgggagatttaatgattcctaggtcatactactctcacataacaccatcagaaaattcatagctgatggtctgtcatataaataaaatacatatatgcctattgttatatttatattgatcattttctcccttttatcatttcttctggaggttattattttaatggagactacttctcctttaggtctgataattacatctttctctcccaatgtaccaaatgttgtatctattggaatttgtacaattaatgctaaataattaaattaatattatgtagccttcatattcacattatattgcctggtaattgaaattgtcttctctctactttcctcctttataagggaatgtatcagctttatctaaagaaaagtgtacattttgaggagtctggaaaattacattcttaattatgagtatttctgaaagatgtgatgaatgacctttggctggtttagtacattgtttgcttcatgctccaacattgttgaataagctttaaagaaactgaagcattaaatggaaatgaaaagacatcatagcagaacttaggagatgtagcagaagccttaatcagagggaaatttattattgtaaatacctacatttaagaagaagcaagcaccaaatcagtaacctaacttcataccttaagaaacaagtaaaagaagaacaaactaaattgaagaaagcagaagaagaaaggaaataacaaaagattagaacagaaataaacaaaatagagacaagaaggacaatatggaatcaacaaaatcaaaattggttctttaaaaatatcaacaaggtgactcacaccttaattccagcactttgagagaccaaggcaggaggatcacttgaggccaattcaagaccaactggggcaacatagtgagaccccatctctacaaaacaatttaaaaattagccaggtgtggtggtgcacatctagtcccagccactcaggagactgaggtaggaagatcacttgaacctgaaaggttgaggctgcagtgagccatgtttgtgccactgcactccagccagagcaacagagcaaactcctgtgtcaaaaagcaaacaaaagtaaacaaaaagatcaacagaattgacaaacctttagctagattgactgagaaaaaaaagaacagtgtcaaattactaaaatcacaaatggaaatagaggacattactactgactttatagaaataaaaaggattataagagattattgtgaataattgtctgctaaaaaaattgaataatctggatgaagtagacaaattcctagatataaacacactaccaaaactggcttaagaagaaatagaaaatctgaacagagctaaaaccagtaaagaaatagaattagtaataagaatcctcccataaaagaaaagtccaaggcaggacccagtggctcatgcctgtaatcctagcactttggcaggctgacgtgagaggatcacttgagccctggcgttcaagaccaccctgggcaatgtggtaagatctgatgtctacaaaacattttaaaattaaccgagtgtgatggcatccacctgcagtcctagctacttaggaggctgaggccagaggatcacatgagcctgggaggtcaaggctgcagtgagccatcattgagccactgcacttcagcctgggcaacagagtgagaccgtctcgaagaaaaaaagaaaagtccaggaccaaacagcttcactagtgaattctaccagtcatttaaagaagaaataatgccagttcttcccaaacactgcctaattaattctgtgaagccagcataattctgataccaaagtaagacaaatattacaggataaaggaaattacacatgaatatcctttttgaatatagatgtaaaagtcctctacaaaaatactagcagagtgaatccagcaacgtattgaaaagattatacatcacagctaagggagttttattccaggaatgcaaggatagtttagcctatgaaaattaggctgtgtaattctcaccacactaatagaaagaaaggggaaaaaaacccatatgattgtctcaattgatgccaaaaaagaatctcagctgaacatggtggctcacaccagtaattccaacactttaggaggccaaagcgggcagatcacttgaggccaggagttcaagaccagcatggccaacatgatgaaactctgtctctactaaaaatacaaaaattagccaggcgtggtggcacacatctgtaatcccactccttaggaggccaaggcacaagaattgcttgaacctggaggtggacgttgcagtgacccgagatgataccactgcactccagcctgagtgagagtaagactgtctccaaaaaaaaaaaaagattctgacaaaatccaacactctttcatgatgataacatttaacaagctagaaataggagggagggaacttaactccatttggtaaaggtcatttacaaaaaacccacagctaatatacttgttggtaacagtgtgaaaaccatctcgctaagattgggaacaaaacagtgttttctacttttactgattacattcagcattgtactggaaattctaaaccaggggtatccattcttttggcttccctgagccacattagaagaattattgtcttggacagtacatcaaatacactaacactatgatagctgatgagcaaaaaaataataataattgcaaaaaaatctcataatgttttaagaaagtttacaaatttgtgttgagccacattcaaagccgtcctgggccacgtaacccacaggctgtgggttggacaagcttgttctaaacagattagtggctgggcatggtggctcatgcctgtaatcctagcactttgggaggctgaggtgggtggatcatgaggacaggagttcaagaccagcctggccaacatggtgaaaccccatctctatgaaaaatacaaaaattagccggacatggtggtgcacgcctttaatcccaggtactcaggaggctgaggcaggagaatcgcttgaacctgggaggtggaggttgcagtgagccatgattgtgccagtgcactccagcctgggagcctggatgatagagtgagactccatctcaaaaaaataaaaaataaacagattagctagccaagaaaaagaaataaaaggtatccaaattgtaaaagaagtaaaactatcctcatttgcagacgatatgatcttatatatacgaaattttaaggaattcacaataaaactattagagctaataaataaatttagtaaagttgcaggatgtatggtttattagtaataaaccaaaaataaaattaagaaaacaactccatttacaatagtatttaaaggaatcaaatacctaagaattaatttaatttctttaatttttttttcatttcccttgaaaatcactaagaattaatttgaacatgaaatataagacttgtaccctggaaactacaaaacactgccagaagaaattaaacaagacttaaataaatgtaaacacatctggtattcagtccatttgaacacttaatattaagatgtcagtattccccaaagcaatctgtggattcaatgcaatacccatcaaacttccaatggcttttttttgcagaaatgaaaaagttgttcctaaatttatatggaatttcaagatcccaagtagccacaacaatactgaaaaagaacagtgttggagtagttaccctttccaatttcaaaacttactacaaagctacagttattaaaacatatagaccaatgggatagaatttggagtccagaagtaaacctaaacatctatggccaattgattttcaacaagataccaaaactactgaatagggaaatagtattatcttcaatatatgggactgggataactggatatccacatgcaaaagaatgaagttgtacttcttcatcacaacatatacagaaattataataattatcattattttgagacagggtctcactctgtcacctgggctggaatgcagtggcactatcatagttcatgcagccttaacctcccaggcgccagcgatcttcccacctcagcctcctgagtagctggaactacaggcgcacaccatcacacctggctaatggttttaattttttgtagagatgggaccgccctatgtggcccaggcttgtcttgaactcctgggttcaagagatcttcctgcctcagcttcccaaagtaataggatcacaggcgtgagctgccacgcctagcctacagtaatgaactcaaaatggatcaaggacctgaatataagagcaaaaaactataaaattctcaggagaaagtctaggagtatatctttatgaccttgaatttggcagtagattcttagatacaacatcaaaagaatcagcaacaatataaaaatacttcattaaaattgaaaacttctgtacatcaaaggacattatcaagacagtgaaaagacagtctacagaatgagggaaaattttgcaattcatatatctgataagcctagtatccagaatatataaacaactcttacaattcaacaacaagaagataacccagttagaaaatgggcaaaggacttgactagacattcttcccaaggagatattctagtgtacatcaagcccatgaaaagatgcccaatatcattagtcattagggttatgcgaatcaaaaccactgcaaatgagataccactttgcccctcaaggatggctgtaatttaaaaagcaaacagaaactaggcaaggatatggagaaattggaacccttgcacattgctagttggaatgtaaaatagtgcagcccctgtggaaaacagtttggcagttcctcaaaaagttaaacatagaattacacatatgacccagcaattccactgctagttatatacccaaaagaattgaaaacaattactcaaatacttgtacatgaatatacatagcagtactattcacagtagttaaaagctggaaacaactaaaatgtccatcagtgggtgaatggataaacagtttgtggtatagccatactaaatggaatattatcctaaaaaggaatgaggtactttgatacaagctgtaatatagatgaacttcaaaaacattctaaatgtgagaagtcagacacaaaaggccacatattgtatgagtccaattgtgtggaatatcctgaataggcaaatccagagagacagaaatggattagtggttgccatgggctaggggagggtggaatggagagtaagtgcttaatggatctggaatttcgttttggggtgatgagactgttctgaaacctagagaggtgatggttgaacaacattttgaatgtactaaatgccactgatttgaaatgaaatgaaaacattcagtgtttatgttatataaattccacctcaactttttaaaaagctcaaacaccaaagaaaagtcatttaaatgagagtttttcttgactgttagactggaggcagagattgggctattagggctactgttccaaagctctgctcctgctttttgaccagagctgaggttttatttctcagttcctttgtgatacttggtggctgaaacaactactttttaagagtatggtgatggcagtaaggggtattaaatatatgatgggggattcgtaaatgtaccagaggaatcacagttcttttcacttgagagtatcttctcaagtgtattcaaccccccttccttttgaggtcttctttccctctcctgtctttcaagtctctgtgatcctatttcatctcatctaccagaaatcttggtgcaaaattctgccaaactaacctcgtttgttttgtgagagggttactgcattagtaggttagagctgctgaatctctgaattataaatgaagcacttcacaaagtctcataatgtcactgtagcatacctcagagctctctcctcacccttgtcatcctgatgggttttctcttaatcatatttttgatgcctaagatattaaaaaggctagcatatacattggttgacagattaagaatctgaaaaagatgggaatggatgataatggtggacgaagtataacaagatgaattttatcagagataaatgttaagtcttgtatttgggaccaaaaagcacaaactgaacaagtacaacattggagggacatgacttaatagcagcagatgcaacaaaatgaagaaccacgtaagcatgtgatcattcttaaccccttaatgcgagctaacataaatagattgcttaaatatagtgttaaaaaagagatggtgaggaggactctcaaacccatgtcatgagactcaagtgaaaaaagcaggaatgggccagctgcagtggctcacaccagtattcccagctctttgttaggccaaggtgggaagattgcctgagcccaggagttcaagaccagcctgggcaatatagggagaccctatctctacaaaaaacttaaaaattagctgggtgtggtggcacatgcctgtagtcctagctgtttcagcaggctaagaaaggagaattatttgagcccaggttccaggctatagtaagctgtgatcgtgcccctgcattccagcctgagtgacagagcataatccatctctaaaaagaaaaaaggaaaggaagaagaacagaatttctgctgccgtatgtgttcatgaaagtattaaagcaaagactagtgaccatttttcaaaaatattgatgattaaaaagtgtgataccacacagccactaaagtgtctttcaactctaagattttatggatctacataattattaaaaagcagacaatgtggctgggcgcagtggcttacacctgtaattccagcactttgagaggctgaggtgggtggatcacctgaggtcaggagtttgagtccagtctggcccacatggtgaaaccccgtctctactaaacatacaaaaattaggcatggtggtgcgcgcctgtaatcccagctactcaggaggctgaggcatgagaatcgcttgaacacgggaggcagaggtcgcagtgagctgagatcttaccactacactccagcctgggcaaataagtgagactccatctcagaaaaaaaaaagaaaaaaaggccgacaatgtgagggtggagaaaaaaagagaaagtaggtatgggctgaaagcagtggtctaattgaattcaaaacgtacttaatgggtgcgttctaagttaagacattgctgaagttgtaaataattcagaagtgatgaaattttcaggtttgggtcagtatcagcaggaaaataacttgtttccttggccttattttatagtctagtctcctgagacaagatctggggcttgggagcccagcacagctatcttcttcaggaaaacctgggacagcatactattcattctctgctacaagttccaggaggagaccactccatgactctgcagcgcttggtgagtgtatcacacaacaaatcccatcccacatatgttgttgttgttttttcctcccataatctgtacttctggctatgcttttttttttttttctttccgtttctttgtttaagacagcgtctcactctgttacccatgcaggaatgcaacagcacaatcttggcttaccgcagtctcaacctcctgtgctcaagccgtcctcccacctcagcctcgcaagtagctgagactataggcatgtgccactgtgcctggctagttttttattttttgtagagacagggttttgccatgttgtccaggctgctctcgaactcctgatctcaagtgatctgcccacctcagcctcccagagtgctgggattacaggtgtgaaccaccgtgcccagccctgtctgtgcttttaattagaagagagttggattcgtgggtatcacattgatgtcagggcttatttgcacaagaataatacatccattaaatatttaataaatgaaattatcaaaattcttacttttataaatacattgtaagtttttaatgaaaggtttggccatgaataattttggatgactgttcaatttgtaagccataattttaacaagtttcaaacagccagtgtaatactcttgcttggtcctcacatgagcaactaagtagtgaaaaatgagacttaactagttttccttcttgtaattagaatttcatgttctaatgttaataacttaattctttactaaaaatgatataacaaaatttgcaaggtggttttatatacattctcatctcatcagttcaccaatcctgctagtcagttgctataaatagatttaacataaaaactgagggtcaaaagggagggcaggcacattcatataattagtacttaggataaaattttaagattttctaactccaggttcattgtcttttgcatattacttgcttctgcactccactttgtttttaattgaggttaaatttaccatattaagttgtacagttgagtagcatatactacattcactacattgtgccgctgtcacccctatctagttctgaaacgttactgcaaaagcaaactttgttcatatgaagcattcaaacctcattattttttcattagctcccttcttttatgtcttacacatagcctaaccaggccagtgccttttgttttactgcttacagcaagccttaggtattctctgatgctttatccaaactgtgtttaaatgtcagaatttctggtgatttctaccaaatatcttttaaacaagatacttaaagctgcaaagcatttttaaattaaaagtgggccagcttctaatatatagtccaccaaaagattatgtcacatttttttattgcacaggcatttgatgactgcttcatatttatgtatctactttctattaacctgtgttttggtgaaatattcctggtctctgggtctagggtctgcttgtgggtataaaagggcactatgatagatcatcatattcagcatagagaactctgattagatgtgtccacttctcagtatcatggatgatttagtatgtttactattaagtcagcccaggtgatttagaccagtatactttttgttattaaagaaaggataaattgtaaatgcatttttccatctccagtcttgtttcctacctaatgagttagtcagaataggaacattgattggagtctagacgtgtcagtgttactctagaaaaataacttgttagtatgctatgtgagtatatactgtgacaaaaagcacttagtacaagctaatacactattaagttcagggggaaaattagttattgaaataactagggaagaggggagtaaatttcagaaaaatccagacttaaaattcaggttttctataaattaaaacttgtatcttcttcattttaattttgattatgatgatagacactattgattgtctcttccatgccaggggcattgctgtacacactacattttcacaaaacctctgtgaggttgtaatgttaacttcatgttacaaatgaggagctaagacccagagaagctaaataatttggccaaggcttgagttgggatatggtagttctcttggtgcccagggaggtccaccgatttcctgtgtaaatgtcatttagtgggttcttactacattctttatggctgtttctcattgttagccgctctttcttagcattacagttattgataaaatctcagcgtttaaaagcactcttgagatgatctgcatcaacctcagcatcttcacaaactatttaggtgctttaggaaatcagcatgctgcataacagtatctaattacccaatttataatcatttttccccacattttaatggaaacctaataataatggctaaaatttgttcagtctcatacttgtgttaggcactcccctaagcgtctttcacgtattatcacaatacatgaaatacacaaaaggatgtgttaccccctttttacatggaggtaactgaagctcaaagagggttaagtaactagctgctatatgatggagctggaattagaatccagccagcttactctctttttattctattcacttatatttatgtatttttcttttttgagacggagtttcactcttgtcccccaggctggagtacaatggcatgatctcggctcactgcaacctctgcctcccgggctcaagcgagtctcctgcctcagcctcccgagtagctgagattacaggcacaagccactgtgcctggctaatttttgtatttttagtagagaaggggtttcaccatgttggccaggctggtctcgaactcctgacctcaagtggtcctcctgccttggcctcccaaagtgctaggattacaggcatgagccaccgcacccagccatctcttagctattatattttgcaacttcccagaagtggtcggtgaatcccaggctctcatgattttaaatcagacattttgtatttgattgtatagtggtgggtaaccaaatacaaaagaaaaatttcttttcacatggcagtggaaaaactggcctaaactaatcttttactaataatgacctctaagtagaatgataggctctaaactggtaggggcagttcagttgactgttttcgtacaaggagtatggcttttgttcaagggaatgctgtattagttgtgagtagttggggttttataaatacagagtgtgccagatgttgttcatctttggcacttctgttttaaggaaatataggcttgcctcttggggtcagaaatgaatacttcccccctttgctgttgtgtacagttttcttcatatgctacatataaagttgcctttttaactttgcagcctcctgggatattcactgtagagaattcccagtccaaagttaaatgggttaaactggggccgggcatggtggctcatgcctataatcccagcatttttggaggccaaggccgatgatcacttgaggccaggagttcaaaaccagcctgggcaacatagtgaaacacctctctacaaacgaaatttttttaattagctgggtgcggtggcacacacctgtagtctagctactcaggagaccaaggcaggggaattgcttgagcccaggaattcaaggctgcagtgagctgtgctcataccactgcactccagcctggccaacagagcaagaacctgtctctgaaaaataaatgggttaaactgcatgttttattgtatagtgtcatttatggaccaggaaaatataatcccagcactttgggaggccgaggccagagaatcacttgaggccacctctacatccatgggtttctcatctgtggattcagccaaccacagatagaaaaaaaaaaaaatgtaatgggtgattgcatctgtactgaacatgcatagacttatttttttcttgttattattccctgaacaatacagtataactatttacatagcattttcatagtattaggtattatacataataatgtagagataatttaaagtatgtaagaggatatgcataggttatatgcaaatactacaccattttatttaaaggacttgagcatctgtggatttttgtatcctcagggatcgtggaaccaatcccactgatactgaggaatgattgtgctgtgattgtttaattcccatttttacagctttcaaaagtattacactttacatcagcttcctcatgtgttctctcttcctaataatgagcccctcagaaaattctgaatttgatctattttttgtgtaaacctggaacgctgtgtttatcactttgttttacagtaaataagatgaacaagttttatattttacatataagtaaaattaactcatcaagtgagactggttaacatatgaaatactcatgttttcatttatattgataaattctgagaaagaaatatactttctctgtcaagttatttcctggaaatataaacattcaaggacaaattgtacagtaattaatgctgtagttgtggttatagccacataatgttaaaagtaaatgtgtcaaatactgaatgatattgcatttgtcaatgcccatatttaatagtttatgtatcatatattgacattataaccttcattttatttctttatttcaaatttttaaaaaactgtaggatagcaagcatagcattagctctcagtttttaaaatatgcttttaagcctaattctcagtgtgatgcaatcactaaatatgactctgctaaaggagtcatattatcaacatgacctattacactaagtgcccctctgcaaatgaaactgtaaagtacctagtatagtacctggcacagaacagcttcttttttttttttttttttttttttgagacagaggttctctcttgttacccaggctggagtacagtagtgccatcttggctcactgcaacctccatctcccgggttcaagtgattctcctgcctcaacctcccgagtcgctgggattacaggcgcccgccaccacggccagttaatttttttgtatttttagtagagatgggtttcaccatgttggccaggctggtctcaaactcctgacctcaggtgatccgcccaccttggcttcccaaagtgctgggattacaggcctgagccaccacatccggccgaacagtttcttaagaaatgttcattcccttccctcatactagtttgttgttttctttcttgtattggttcatttgctgtcatcttcccaaatttatgggatatgtattttcagaatgtatcacttttttaggagaacctgtttttcactgggactagttaaaaggaatgaagccctcattactgtattttgctgcttactcccaaatattggaaaacaagaaagacgctaggggaaaagttattctgttaatttgaagtcttgatttttttctggtatattatgctgaagaaatgtattgttttccatctgcagatcccttgcaagcaaaaaaagtcagaaaggtgcctcctggtttgccttcttctgtaagtacctatctttttttaacttgatggtaaacaaactgatttcaagtgttccgtattaccttgctacaagggtacattcgattgatgcgagtgggcatactttacatagtaattgttcagtgcttaacaaaatcattgattgaggtaaatccacatttaatgtttggtttttagatttctctgcaatgatttgtagcttactcatatgctcttactccttgtccctgtcatttgaattcccctcttgggaagaggactaggccagtagctgtcaaagatgatctcctatgcaggtcttttgatgtttaattagtcattatgttgctgaacaggaggacagacagagattaatagctgaaaatcttagaaatttacatttgtaataatcccaatggagctaaagacattaagattcggagtacatgtttggctcagcttgcctcagtaggactgaggttattaatatgcataaatcaccaagtcagatgttcattgtgaagcccttgtgggttttaaagccttcattaagcctttcctaacttcagcctagcatcaggaaagctttcaagcaactagtttgttgatccctctttgctcaaaaatgtatcctttgagaataaagggctttgatgaagaaggttggaaaggtttggtggaacaatcattaatggccatgataatctaatactgtaggggcgactgtgctattaaatatactttattctttaaaggagtaaaagtacttgtaaaggaacctgcatcgtaaatctacctacaatttttaaatctctggtgcaaaaaacggaagtttttttttcttctccctttgcttagaagaaatggtgagtgaggctgtttgattgaggccccagtgccttgtagggtacatctttttgttgtgtaaatggatgttgggcttttatttggcagtactttaacccatgggcgcaggtgccgccagatgagtcagctcatcgaagtatagactgaatggaatatccggcttggcaagtagtaatctagaaggagcagcatgggtctgagctttttagtttttattaaggctgaagtagagatacaatctttttggttgtctgccttccttcttttctgtgttattcccctgccttctctaccgtgtgatacatgaaaagtcaaatttgaaatcctctctgtaactcagttccagatggatctgagttttatgcagcctagggcagctgtgctctgaacctgcagcctacctggaaggttggcttgcagctgcaggcattcttaaaagcttttgcttgcataagcacttgggcccactagagactgcttgataaacaaaatgaacacaatgcctcaaatcgttattcccgaagacaggaattttttttcagcagcagctaaaaatagttggcaatttacattttaacagttgtgtgctatgcaggggtaggtggttcaacagcataacagatgatttctgttaaattaacagaaatcatattaaaactgacagtactgctaaaacatgtagcagtgcaattttcttgtaatttattactgtaattcaatgagagtaataaaagttaaattacacattaatatttagtagaactatacaggttaaaaaaacagattagtgaatgaaaaattcatctcatttcttaacctgacattaagaaacagtgtatgttcagtgttccatagttctttgattttaaaagcagtaggcaaaatggacagaacagtctggaaggagagtagacactggaggtcaccagcatttcttacattcgtaatcgtaataacattcattacttggaggtagtagttctctgtattgtctcaggtatctggaacaagtcactgaattctgatgaaacttgatttctttgagaaccattaggaaattttgcaggccaagcctacttatatattgtattttactagctatattagtatatattaaatgttattaaggatgtataaataacacattcattttaattaactgaaagtatgttttagataaaatgctgtgttgaaacctcagggtctttttgttttattttggtttttttgaggcaggatctcactctgtcacacaggctggagtgcagtgacacagtcactgcaaactacagccttaacctccttggctcaagcgacccttccacctcatcctcccaagtagctgggactacagggacaggccaccacggctggcttttttttttttttttgtagagacgaggaggtctctctccaggccaggatggtcttgaactcctgggctctgtgcttctcctgccacagcctctcaaagtgctgggattgtaggtgtgagccaccacacccggctgaaatctcaagtatttaaaaaagaaaacagaaaaaccttaaagacagatatttttcccacttctaggattaactgaaaagattttaaaagaaaatactttaataaataatgacaaaatatgtcctaagaacacttaaggttatactgtttaccttctcaggatctaaaatagaattttaagttgtgatttcctatttcagagcttttattgaaaaatatgcaaactataaacttttgacatgcaaactataagaaaaatggagtattaaaaatgaaaattgactatgtatattttattttatgataatttgaatattatactttccaaaccatattggaaatttggcagtagcattcaggatttcatcagtttcctacttgttcattctatctttaatctgtaaaatatatgtgactttttctaaagaaacagtgaaaggactaagtatcgctgatactgatacaaaaaataataggcagggttacttagcatgcaaagcattgataatctgtataatttgatcatgtagcattgattagagactttttttgtaaactgttttatatttaggtatcataagtgcataactcagcttctctgttcctctctgcagaaccactgaatagtaacttttgtttgtggatgaaggtctaactaggctgtattaaatatcattagagcagtatagtcagtaacattaagtgaatggttcacctaaatctgcccagctcagttactgattggctgtatagccttagattagtcagcccttaggatgtttggagtgggaaattcgaagttcctttcaggtctaaattgctacatacttacggttttaaaactgatatgctcaataaataaccaaaaaagaatagtgagcatagttttcttcctcctgatgaagaagtgatgtttttaaagcacatgagattctccacttgcttttctagacagatttaaagattgggaaaagtggacttttgtagcagcaacagtagaataatgcttggacaccgagaattcaaacatatacaaacaccataattgtcttctaggacctcactatcttatatgagaaacaagcattcagggaattaattatattgcagtgaagcaagtaagggtgtgtaccaggtgctctggtgacatagggtaggtagaactaaccctactatagtgacttcaggaagagttgacatttaagttgtgtctggaaagatgcgtagcagctcatctgttagagaaggagagaatggaccagacaggtaaaaggcctggaggtgtgaaaaaataaacacgtgttgaggtcacatctaaaagtacagcattactagattatatacaagttgcaacctttgtaattttcctatagcaaacccactcttctactccagaggtagattgagtgggggcacacataaaatcagtacagatatgagaagagataagttgtcatagcagtctatcctggataaacaactcaactgttctggccaagagataatggaaggcatttatagttgttaaagttttatctgggagtttccaaaggcatgggtggtactttggatttgcagggtgttttacttccgttttagggttcttaaacctcctctcccattctctaactgccaactcttgtctttgttctttgcatgtacatcagctgtttttcatctatatgagatcttcactaagatacaaagttcaagggaattttgaatctctgggtggggatttggggcagggttttttcctggtaatttgtcgggggaaaaaaaggaaacatttgtaatatatttgttagcatcctttacagcctcagtgtcactgtgttgttagtggtgcaagacttcatgtgtgaggaactttgttaaccattacccatatcctaatcttcaaccttttgccaaacaactctataactaatattccctacttacaaataagaaaattaagactcaaagacataaattaacttgccaaaaatcacacatagggccaagattacaacctaacttaatatcaaacaccattttctttttgagtgttaaaatctgattctttaataccttggtttattcagaaaatatcttgcttagtatattaaattaaaacttaaatttattctgtcaattatgtttttactgatcaaatttatttttatttggctttgttgtttaaggacctacagtagtagaaaaccacagacttcccaattaagcatgtgatggattttatttatctgccctcagcttttttttttttttttgagacagagtcttgctctgtctcccaggctagcgtgcagtggcatgatctcagctcactgcaagctccgcctcccagattcatgccattctcctgcctcagcctcctgagtagctgggactacaggtgcccaccaccacacccggctaatttttcgtatttttagtagagatggggtttcaccgctatagccaggatggtctcgatctcccgacctcctgatccacctacctcagcctcccgaagtgctgggattacaggtgtgagccaccacacccggtctgccctcagctttttattttgtaaccttggagaagttgctgttgagttctcggaacctccagtttctatttgtaaaaggggatgataatgcctatctcagatgttattgtgagagtattatgtacctactataagtgtggtgtatcctagatactcagtaaatgttccttcattattctagctagttcataccactacagcctgaaatttaaagaagtttagcatttcatttttaccaaattttgatgaaaagcaaacaaaaaaaagtttgaagatatataaaaaaggataagtattatagtgaaataaaaagttttcacgttacctccacctgtgtatataatgtatgtgcctggcacctaatgactgcatggtaaattgtagcagttccttttgttgtttagaaagcattcacttgcagaaaaacaatctacaaaaggaaggaaaacttgttgaatcaaatccggctgcccctagaattcattctaattatttttgttttctgaactctcaggagtcgacactttttttttccttttttaaatcactcgttgaacatctttatggccctctgaagcatttctcagatgcagaaaagtttctttgctctttattctttatttcttaagttagtgttaatatttccaaacatagatcattttcttttatgtgctgcagtagataatagaagaagcaagatatatcagaacaagtctttccaaaatgtaagtaaatacctggagagatttgaaatgccttcctagacccaaatacctaaagttgtattcttgttctatggcaattgaaaatacctttttcatatcaaatattaactctgcatcaaaatgacgtgtcttacaagttttgaatgtaacttgtttgcagtcccgtacgtagcctgatgacatgattgtttcttaatcaagtgtcatgttaaagagtgtatgtatatattcccacaaaagctgttactgtaatttcttgcttaaactctcaaagtgtaatttaccccatcaagaaaaatattttgtcagggcacggtggctgtagtcccaaggcaggaggatcacttgagcccaagagttcaagaccagcctgagcaacctagtgagaccctgtcactgcaaaaaaattagccaggtgtgattggcaccccctgtggttctgtctccttcggaggctaaagtgggaggatcacttgagcccaccatgttcactccattgcactccagcctgggtgacagaggaagagtctgcctgcaaataaaaatttgctagctcttctccaccactataaggagctttattgtttctgacatgaatcaaaacagcttagactctactttttcttggtttgatgcagacagttacaaagttcagtggcccttgaattagtcactgactgtaatttagaaagtgatgaggccaggcatagtggctcacgtaatcccagcactttgggaggccaaggtgggagtatcccctgaatccaggagtttgagaccagcctaggccacatagtgagaccttgtctgcacacacacacacaaaaaaatattttaaaaaactgtccaggtatggtggcatgtgcctgtggtctcacctacttgagatgctaaggcaggagtatctcttgatactcctgaaagagttcaaggctgcagtgggctgtgatttcaccactgcactccagcctgggtgacagagccaagactctgtctcaaaaaaaaagaaaaagaaaagaggtaagaaagtggtgcctttctttctcctaaagtttttatggaatttcattttgttgggaatggctctttttaaaaaaatgtgaatttttagtcatttgttatcgtaaatttgaaattgtagggataccttttgagacaattggaaatatcctgaggtattcccaaaccataaagactgctagaccatgtctaataatctagcgtgctgctatacatactaagtagaataagaatattcaaaagaaaaaaatactaaatcctgagggtgtctaaactgaagatttttttttttaataggaaagagatgacaaacagaactttctgggatgggtggaaatgaataattttaaaactatgatttaagagcttgctagccatctgaaccagtaagaaaaaggtcaagagttagaactatagagaaactgatagctccaatttatccatgaaaatagtaagatgagcagcaagaaaaatactctgtgagtagagtcgtatggaagtcactaggaagccaagataacagagtgtgtttataggcaattatccggcccggccaggcgcagtggctctcacctataatcccaaaactttgggaggtggaggcgggcagatcacttgagcccaggagttcgagatctgcctagccaacataatggaaccccgcctctataaagaaatacaaaaattagctggcatggtgttgtgtgcctatagtcccagctactctgagagagcgttgcttgaaccctagaggttgagattgcagtgagccaggatcacgccactgcactccagcctgggtgacagactgagaccctgtcttaaaaaaaataaaaataaaaacaaacaattatccaaggcccttaagactagcaagaaatctactgattctggaataaatagtatttacataaagtaccagcttttgctgaacttcatgagtaaaccctccagatcttgaacatgagttagaataggtatttgcttagttccttgggcaaacagcatagagaacacacaacaactgtatatacttaagagtttcgggctgttagatgaggtatctctatttgaaggctactgtgatacaaaatttccaaagtggcttattcagtctctgaccttacaggtcagactagcagaaaaatctttgtatgtaaagtacgtaagtggattatcctttaatccattccaaacttatattcagtttagtcgttaagtgaaagatttttttcatacattaataagaagtagccactgtttatgctgacagtaaccactgttcagaacagtgtcagaattaatagcctttaatgtgtagttctaagatgttgatttttgtgagaagtcggtaatgtctttgatgtaatttcaaaccaaaaagcagaaggaaaagtaaccagtgagtgagtcctatggatccaattgtactgatatggctgtatacagtgatacttgttattgttattttctgacttctctattccttttaaaagaagaacatggctgcatttcatttacaggtagcttttaaggtttattgaactctttggctgctggtaagatcttagagacttcacaaagcagatgtaggataaagcccagtatgtgtgcatgtttgtaactcatatggtttttaaaggctatatggttgaattatgtaaatgccttagtctgtcaatacaataaactctggcccagtgcccagggtcttaaggcactaaagaatacaaggtaatgaggccaggcgtgatggcttatgcctgtaatcccagtgctttgggaggccgaggcaggcagatcactagctcagaagtttgagaccagcctggccaacatagtgaaaccccttctctactaaaaatacaaaaattagccgggcatggtggtgcacacctgtactgacagacactttataaaactttatttatgaaaataaataaagctttatttatgaaaatagaagtttgccaacctgcactagatttaaagaaaaggtaaatgtagttccagggaaaaacagacctaaagagttaaaaataaaattaaatacttcttagtcctgattcttggttttattaagatccactaccttgtattctctttttttttttttttttttttttctgagacagtctcgctctgttgcccaggctggagtgcagtggcacgatctcagctcactgcatcctccacctcctgtactcggaaggctgaggcaggaaaatcacttgaacccaggaggtggagagtttattgtattacagacacttaacttaaacttagatatatttgtgccaatcaccattttttttcctgttccaactttctgatagaacctaaagctgggccatagtgcccagcagtttgggaggccaagatgggaggagtgtttgagcctagaagttcaagaccagcctaggcaacatagcaagaccctgtctctacagaaaaaaaaaaaaaaagaaaaggaaaaaaaaaattggtcgtggtagtgtgtgcctgtagtactaggtactcaggaggctaaggttggagggatggcttaagcctgggagtttcaggctgtagtgagctgtgatcacaccactacactccaacctgggtaacagaacaagaccctgtccccaaaaaaacaaaaaacagaggaacctaaagttaaagatagttgctggcagcttgggaatcggttccaacccaagtgtgactgtgaaaccaattcttttgaatcatgtgtcatgtttctggtctaaacataaaaccttcatacaaaaattaagaatatcttccatccctagaaaattcattttttcaatgttaatccctatgaatctaagtaaattttatatggttcttagtttcctttttgcttttatgaggctagtattaataataaataataaataggccgggcgcggtggcttaacgcctgtagtaatcccagtattttgggaggccaaggcaggcggatcacttaaggtcaggagtttgaggccagtctgaccaacatggtgaaacctcatctctactaaaaatacaaaaattagccaggcatggtggggcatgcctgtaatcccagctacttgggaggctgaggcaggagaatcacttgaacccaggaggtggaggttgcagtgagccgagataaagatcacaccattgcactccagcctgggcaacaaaagtaaaactccgtctcaaaaaacaacaacaaaaataataagtaagaactaagaaaacttcaagttttctgacttgagcttgacaattttttaaactgtcaaactcatcattatttgaaatcatgattttcagtatcttctccagtaacacaaaagatattttaaaatttcaaaaatcagtaacttaaatgagatttagaaaacttatttgctactagtatgggctccatctagtagattcccagtcaggagaatatgaatcccttctgtcaaaatcaacaaatatatactaagtccttatcgtgaatgaagaactattttagactttagggatttaaatatgaataaaatatggaccctgacttcaagattctttttttttttttttttaaagacagagtattgctcagtcgctcaggctggagtacagtggtgcgatcttggctcactgcaacttccacctcccgggttcaagcaaatctctgcctcagcctcctgagtagctgggattgcaggcatctgccaccacacccagctaatttttttgtaattttagtagagacgggtttcaccatcttggccaggctggtcttgaactcctgacctcgtgatccacccgcctcagcctcccaaagtgctgggattacagttgtgagccaccgcccctggccaagattcttatagtcaaaagataaccttgttctttggacaaaaatatcctttttttttttttttttttggagacagagtctcactctgtcacccaggctggagtgcagtggcataatcttggctcactgcaacctccacctcctgggctcaagtgatcctcacacctcagcctcccgagtagctggaactacaggcaagtgccaccacaactggctaatttttgtattttttttgtagaaacagggtttcatcttgttgcccaggcaggtctcgaactcctggactcaagcgatccacccaccttggcctcccaaagtcctgggattacatgcgtgagccactgcacccagcctggaaagaaagaacttaaaaaaaaatttttttttttcttttgaaacaggaattcagtctgtggtccaggctggagtacagtggtgccatcatagctcgctgcggcctcaaactcctgggctcaagcagagaggcagtcctcccacctcagcctcctgagtaactgggactacaggcacatgccactacacctggctacattttctattttttgtagaaaagaggttttgctgtgttgccagggttggtctcaaactcctggcctcaagtgatcctcccatcttggcctcccaaagtgctgggattacaggtgtgagtcactgcggccagcccaaaatgttttttgttgcataattgttgttcaccaggcacatgatgtagtatttaggaaatgctttttgaattaaagggataaaaataaggactacaaggccattattttatgtatctataataggaaacatcacctgttaatgacttcctgctctaagctgtactttttaacttacttctctgattgttcaaaccttcaatatgttaactggccttctttgtataagaaactgaattatatgtcccatttctcccttcaattatgcagttaattcctagttaccaaaataggagcattttaccaaaaccaaaacagaaagcaggaaaattacaggtaattcagccatcagcattaattctacattgttttaggatgacctaattaaaaatatagggccatggtcctcacgcgaaagaaaagtatggaaaacaacaatacaggaattatttttctaaaggaaataagttacggtttcattgacataaatttgaaacagaggacagtcttatatttctcttactagaattctcttcaagaatttaaccattcgtggtcacctgtgtagctatcatctttgtctaaaccacctttacctctttcttaaattatggcaacagctttataactggtcttccagttttattttgtttttatttttagacacaggaacatccttttaaaatctaggtcagatcatatactcctctgcttaaaatcctccagtagcttcccttattataaaaccaacatctttaaaatggcttataagacacctgccacctttcagacttcatcttctaccactctgcccctcccttacttcactctagccatactctcctttttactgcttcttaaagatgtcaagcacactcctacctcagggcctttgcatttgcagtttatggaacacactttccctcgtatccaaatggctagttttctctttgatgtcatatcacactgtcaatgaagatcttttgtgaccatcctatataaaagggcaacatacccctagtacctcctcactcttttcctgatgtatttttctctacagtacttcatacaatctgatatggcctaattcgtttattctttatctgtgttacccaggagcaacataataaagcagggattttatttatgttgtttattgcacctgcagcacagaggtgcataacagatacttaataactatttgttgaataaatgaacaaaggcaaatgattagcaatacagccatagctcttctttctagaccatgcttagctgactcagacaaggtatgagctacatactagataatctaaattatcttcaggagaaagatagctacataactgtatgttttaactcactgtattataaaacatctaacatgcttaaactttgtaaacacttttcagggaggaaaagagagagctccaggttttcatcagaaaactaaaagtcttttcagcagcaaagaacactgtagttatttctatttacatggacagtgtgccccttggttagataggaattattagataggaattagatgagagctaggaagtcatgcatttgttttccaatgtgaggtcttagcattagagtatcgtgttcttttattcatataatctttattcccattttaacaacagtaatacagtttgaaccttttttatataacaaccatttcagtctgaaatcaccagtgttatggcaaggaagcgtcctcaagatcgcgcacctataaagttactgtagtgttgccacccgtttttcactctttactcccttactttatcctgtaaactttccaacctacatactcactacagccacatttgtgtataatagtcctgtttactgctctactaaattctccagccaaaaggagcaaagaaacaagtcatagatgggcactgcatctttattacagaatagtgcaggagcctcagcccacttacttaagatgagctcccatattgactccttaactctgtgttgcgtgctaaaattataacaaagccatccctggaggagattgtatattatttgaagggcatagccataaatgttttgttttccaggtgatgctgtattcaccatgaaatatctgacttgtagattaacttgcacattattgagaaaccaaaattgttattgagtaaattaaacaatgacaaagttaggtaagagttgttatctatcggtaggatgtcactgcttttctttattttgttttactattttgttcaagataaagttgatagggcagggagcagggagcagtggcccacgcttctaatactagcactttgggaggctgaggtgggaggattgcttgagcccaagagttcaagaccaggctgggcaacaaagtgagaccttgtgtcaattatactttaaaaataaaaagaaaaaagaaagattatggttttaaatgaacatattactaggcaatggagttatatataactagccttttagatacttcatttgctggcataaatgttattagaatacaaagcttttggactcttgtcttagaactgagaagttgtaattatgttttcaaattccttttttggttcagcctttcatttcctgtgagggtttagacttttaattatgcctcttgcaggtatgattataaaaatacaatttaaggctgggcatggtggcccatgcctgtaatctcagcactttgggaagtcgaggctggcagatcgcttgaggccaggagttcaagaccagcctggccaacatggcgaaaccctgtctctactaaaaatacaaaacttagcagggtgtggtagcacacgcctgtaatcccagctactctggaggcttaggcatgagaatggcttgagcccgggaggtggaggttgcagtgagccaagattgcaccagtgcactccagcctgggcaacaaagcaggactttgagacatacacacacacgcacacacacacacactttaagattggtgtggacacctggtatcatctatgccagtggatcacagcttgaatcttgaatcttgaatacaacaagattcaaaatacatcagaaaaacctaacaaattctgtggattctatactttaccaaaataaaatggtaattaaacatcaggtttctttcactggaattatttcaactcagtatggcaatgcttcatttaccttttaatctgaagttctgaactgcagttacatggctttgagttttcttttttgcttttgttcatttgttgttgttgttgtttttctagagacggtctctctctgtcaccctcgctagagtacagtggcacaatcatagctcactgcaggcatgaactcctgggctgaagcgatcctcccacctcagtctcctaggtagctgggattacaggtgcacaccacccagtgaattttttaactttttgtagagacaggtcttgccatgttgcccaggctggtctcaaactcctgggttcaagggatcttcccaccttggcctcccaaagtggtagtattacaggcatgagccaccataccctgccttgatttttccttttaagagagaaaaatatttatcataatggaattttaaaaaaagagtctgagagacaaaaatctttcaaaataggaattcagagttttggggtggagtgcataataaaatgttttattagtggtgaaatggctaggaagtctttggcctagtttaatggtttaatgcctgcattttacagaaatggaaaattaggctcagggagagtcaacgacctaccctaagctctcttgcctcctgagaggcagagctgaaacctggatccctgtctcctgactcccagtttagtgctctttcgcgttacatgatataactccacagttttctgggacctgagtagcccatcttatattacatagaatactaatgaatgatagggagaatacttctgccctactgcatacacatgtgctactgctacatagaacaagtagcttaacaaatttcttccaagttttatatctgtttcccagtgtctgtttagggacacttgtcattgttaggaatagtgaagcataaccaaatactggtcaagcactgcttgttttgcgttgttctttgttgaaaatgtatgactgacaccatttcccatctttttccctgttgatgtcactcttcttagatgtcttttcaaagtgaagtattttttggcttttgttaagaatggtcaccagaatttactaataagaaaccattcttaaaagatacgtcttttcataaattcaagatctgtatgatttcttccagtgaatatagcaaaaattagctttgcttttttactttattatcacaaatgtgagggaggatgttttggtagactcaacatttatttagaggcaagaagtattaaaaaattactaccactagcaagaatttttactgaaacaaaaatatagattggggaccaaaaaataacttaatgtataagttacttacagctttggattgcagatttttgaaatggttctgggctaagatgcagatgttaacttctggtcttttaaaaaatgaatttaaaatagaatagaatatcttggtgctgttccatttctcataaattgaaaggatctgatgtcttccagttcagaagaaaaaaaaatcgcacaggccaaaagaagaaacaaaaaaacgggtggcactttctttaagagacagctaatttgacccaagacatcatgttcacaaaaattatttagctttacagatgattttgaatgatagctttgtttgcctacagttttgttttgttgttagattgcctaacgagtcaatagcgcaaagccttgtgtcagtcttgaaagctcttcagaagtgctggtttcttaaggaatttaaaaacctgagggtcatcctcattgttttttttaatgtgtgcatacacacaccattaggcagtcctttgattatggagccatctgcaggaaaattatcaagttgcaacatagttaatgattctcttactgtgttacttcaagtggtaaatgagaagtgacaaactgcaattcacgtagggaaggaaaggggaaagaaagggacagccaagagatgcaggggcagggggacccccccgtctttaatttttcaaagaaaactgctttgtcgttgtgagtttgtgatcaaaagaaacgtgcaatttgcttcagattttacatattctcagtaattatatagttctgtctcatttgaagggttatctaatgattgccttttagaagctttgtatgatctgtcagttctgttcatgttgatgtcggagggatacaatttattcacctcagaaagagatttatttgctttcttctccaggaggtatggctgtttttacatatcctcattatagtcgtatggttgtcaaaaggaaattaattgttcttttgccttaaaaatgcagtttacagaggtgattgtttccattggctatataggtaggtgttttctgttttgttaatcattaagcatttctaaaactcaatttagacttgagatatttgtaaagaaacagtatgacatctgatatcctgtatctgagacagacgctattttatgaattttagcatgtgtctttacattgtgttgagaagtgtatatttatatgtgttgatatccaaataagttatttaccagtactcagactaatctttaatatccactggttattggtttggttaagattttggtaatcacaattgaggcttaattggaacagtttttttcatggagtgccacttgagtaaagatcacaaaaatcaagtctttgatttttaagattttcatacagtggaaagatagtaattagaaggctttttactgatagactgggttatcagcaagatgggagtgattgttgaattaaaagatgcactattgattttagatcaataacactattaactttaaataatatgcattgaatgctagtggattggtttgaaaatgatgcattatttcactggagttttatattcttgatttctttcttgcagaagtaaattttctaaaatgtgaggatattagaaaaaccagaataacaactttctgaacatatttacaaagtagcatatactaccagagaagtctgcaatataatgttcagatataaaacctggaattttgatgtctgacttaattagcaaggctaactaaaatactgcacatttgagagacagcattcactcacatgtcatctctttacaaggtagatgaggaagaagaggcattggggaaggttcttttgctttgaatttgttcagttgcagattctctcactatcctcttaaatctatcctcacccctacctcccttgcagccaataatttattacttaccgagttcatcctttaggaaaatatagtgttcattcgtggagttattcatgtgtcagcttttaagtttggcttcatttattactctgaaagtctgttttccaagatttgattcacttagaaataatgttgaaacttttcgtgaggaatattatgagtgggttttaggtttacttttccagccagatcttctggcttttgggacagtggaatgttgcctgtttgttttagaagaatatacagtaagattaaccactaactggcctatgttaactaattcaagatacataattcacttcaattaaaaattttctttccaaaactatttagaattttgtgttacctttagaaacattcttgcttacggatcatttaaaaatagctataactgttgtagtgatccaaatatcaggataaaaatgagctaataaagtagataaaaatactgcgtggataactctaagaaattttatatagctctccaaggaagatctgtttcccaatcaacagaaaagtaagatggaagagggaaattttgcctggaagcctggaatttaaactgaagtttccagagagctcttacttggtagactttttgaaaacatcttttcctatatcgtcagtaaagaagtaacttgtttaggcaaagcacgttatggctttttcttgcctagtttaggtctgtgcttaatgactactggaatagcagcaaacataacatcctgataacatttgggaggaaaagccatatttgaaaattggtgaaatgcaataatctttaaaccaggaatcatcagtttgctaataaaaggtatatggctccaagttacgtattttgtcagggtcctctggcattttcactagtcattttgctagtgtgtacaatgattcctatcttgctgtaaaacttggtgatttttttatattgttgaactaggtgacatgaatattgagtcagatcacataatcttagagtaacacataagtgattatgtagcgttgtgggtggaaacaattctggataaaaagtgcatgacagttcagaactactgtgcaggcagcctgtctgaaatcaggtttaaaaattggccctgtctccagctgactcgttttgtcagactgagtcataggattaacccttgacatgttcctttaaaaaaaaaaaaaaaaaaagcaaagattaaacaactgcatttactaaagcagcacttgatccatctatatgcatttttttcctgtaatatgattctccttaggacaagaaattgtgctacagctgttgcatagattaaattaatttttaaaaaattgggagcagagaaaaaaagattttattatacaagataatttataatggcaatcaagcaatgaccatctacatcaaacagttttagttttttggggggtaaggcagacttcaagaaaaatgctgttttggagcgacaaacttaaaagacttttccatagcatacaagtagaatataggggcattttatgtagattaccaccagttttgttgatgatttactgtttttgaagaatgagattttaatatcatataattatagatacaggcatagagttttgttgttgttgtttttttaagtttttatatctatgctcaatttaggcagtagtgtataccaagtgactacggtttgtattggcaggggaggtcttacctacacatgtacgagttttatatttatgttttttaggagaacaatgaaaagtagaagcaaaagcttttaattagttactcaactctctttacaaattatgtttcacattcaggtttcatgtttaacactaaatcttacttaggtgtttaataaactgattaggtttgtgcaaaagtaactgtgtttttttccattaaagaaatttgattatactatttggcttttacagtgaatttcttttttatctgaatgtatgtttattctcttcagattatcatataattgcctctaaaataaagaactggtgttaaaatattaaaattttcattgtgctttaataaccaaggttgcttagttgggtttacattatgatgtttgttttatcaaacaacatagtaagtaccctctctgttttctgcccggcatcagggaaatgggcttaactgtcataggtggatgttttttaaccaatataagaaagttttctcagattgaagcgatgattataaaaatgttgaagtattgtcagtgctttgtggctcccctcttctccctattcctcctcaatttctattgaaaagtaagtgttatttttaataattaatagaaaaagaaaattttgattcgattttgtttgattttcctttttttttgttttgagagtagccgatctgtcagtagagaaagactgtgtatggaagactaaaatttacttgaatggttttaaggcatgctattgttaattgtgaatcaaagctttttacacagttctccaaggattgaaatgggtctttgtggtctctcaggagggaggaagttacaaaccactccgcagactggcattttaatagtctgctgtacagcgatgttcttttgcagctgctgcttagccttttctatatctggagagtgtggggaggttttattgttgttccaatactatcagcttttaaaacattgtgaagttagttgcccttattgtctgatttagtttcgttactataatttgatcaatatgttagtaaaaatgaggttggggggatagggggtcccttatagtatattcctagaatatttcacagaggatttctgcttcatgaaaggtacctttaaaaaaagtgatgtgcccccttttgcagcttgtgagctctcctctgattaatacaatcccgttagaacctacaaggcatagagggaaggatagtacaaagaagttttgatgaagggaaatgacacaaaaagggaaagttgctattctgtttttccaggttgtaattacagcaaacgattgattggaaaacatttaaatagcaaaacgtgtctgtgtaagagacacatgtttttgtagacaacttttaaaaccttttgacttcgaagtatgagttagaaatgtctgtaagacatttattcccacacttcttatttttcctttctgagaaatgtgagcattagcataaaaatatgaatatacaaagtattaagaacaataataaacttagaggaaagacttataggaaactgtttagtttattctctcatactttatatgaaagatgtgtgaattttttttaagaacagtcctattgcaggacattataaacttttgattggtgttgtgtatgaagaattcaaggagctttataactgaaaatctgtattattaagtgtttccattttaaaaacaggtaatttagtttcaagataatctatctgatttttggactaagctttttaataaaatgtgttcctttcagttttcctcaacataatttttgtagcttaaagtatggtttgttctagctagttaagaggtatttgcatgatggtctgctttctccaggaagtgattttgtacaagatttaactgtctagatccttcttgttacacatgattcagtgtttccaattcctgattacttgatcatgtgtttatcaaagttgaagcaactttagaccatggcagatggtaacgctggaggtgtagcaagctaggtttctctgccacaagtgctctaatttaattaaaactaaaaacagattagcagaaaatctgtcagtatgccttccttttgtgtgtgtatatatgtatatatgagacaaatctaataatttcttgggttatttttattcagggcatatttatttagcgcttaaaagtgacttgcatttttttaatacctcaaattttgtcttattggtatcctccaccaatgcaaggacttgatggaaattgaaagaggttacttacagcataaaccctccctctgtgctctgtgagttggttcagtcctattttgcataagttccttttgagtagatccatgtgtgaatgcatagtactgaagacttactccctttgcctgtgtggatatatgtcttggagagaggctgtgtgcattagctacaaatagtaacattttcaaaatcaacatgtattgtgcttatcctgtccctggaatgggcagcaattctttgatgtattactacaatgggaaaacggtaagcctttttctttgtatagcttctaactcacttgtttaaaggaaagcagtatacattactcgctttttactaaaatctgtgaggttttgttttatccttttatgcaatgtattagattgtagatttcttttttttttttttttttgcggggggacggagtcttgccctgtcacccaggatggagtgcagtggctcgatctcggctcactgcaaccttcgcctcccgggttcaagcgattctcccgcctcagcctcccgagtagctgggattacaggcacccgccaccatgcccagctaatttttgtatttttagtagagacgcggttttatcatgttggccaggctggtctcgaactcctgacctcaggtgatccacccgcctcggcctcccaaagtgctggaattacaggcatgagccaccgcgcccagcctagattgtagatttctttagaagtagtgtcagtaaagtcctgtctgctacatagctactcaatagttgttggctttcattttatttttaagatagtgtagaaaataaacttgagtttctgagttgttattagcctgatatctttactagcaatgagcttgaaagtacatttgtttttatgttttcgtatattgtgaacaaatccttacataaaatatgtatatacacacatatgtattgagaattatttgatgctttgtagatggaaggaaaagatgaaagtcatctaggatattcataaaaataacaagtatgaagctctggtaatgattagggaagcagtcagctagtaagggccgtatttcctgtttagagtttcaggtccagagcctgacttctctgggataccatctgtttccaatcaaactagaattttgaccttgtgtggattcatgaaataaatcactattttttaaaagaatgcatttatacattttccaaagaatgcactgtacttctggttgatttatagcaagcacatgactaggtgttttaaaataatacttttttgttttgctaaacaagagttctattctttaaattaattacctaatgttaataatttactgtgtttctacaaaaaaatctataagccagaggattttatatattctaaaaaaaaaagagtaaactcggaaagtttcaataggagctatctttgtaagatacttgataaatattattaaaaggtacactaatgaataacagtgttggtttatgtcagaaactcagtgttttccttctaaatctttcacaaataattttaccctcaggtgtcttatgaaaaaatgcatatatgggcttagtgaagggggggagaggggagcatttttaatgttaatgttttaagttatagagaatattcaattacattttactaaaatgggcttaaaattagatatggttgtctcttcccttttcatcacttggaaatgttttaaagtagcctatggctacaactaggatactaagaactaataaaagcactttttcattcactgattgctttagtaagggctctttggactgggccagtgtttggttgtgaacttttgggtaagctttcaaaaaagataagcaagtcaaaatatctttaaactcattaaaaagtgtatgttcaagctgcccatataagcagagctttggataatgtaagaagtagatttagatggatgagtgaaattatttaatctctatataattttcttgccagctgtctttcaaatgtgaaaataattttcttttgtgtctgattttaagtaaaacagtctgaacatggtatgtgggtatgtgtgtggggtgtgtgtgtgtgtgtgtgtgtgtgtgtgcacgtgtataagttcagtaaaattaattatgtaggaccctgaaccagactaactcaaaatgagtttagattttattctttggaaagcacaggttactgtattacatttctctttgttctacattgggaggggggtagggggagctttgatagtggtatttccaggcttatggtagatggcatagctggtatggtagagagcctggaaaaattgatagtctgtgcctaatataggtcaaaggtgacttttatgttctggaaaaatatataaataaagagatgatatgttggcttagtcctccaaatcataagaccctagacttgtatgtattttatttttacccacctctagtttttaaaattattctctagtagttattagaagtcattggcaacattattattttgtgatgacttcagttttcttcaataagaaaatcgtggtatgtaattacattgtctcaagattatataaatgtattattttagtgtatattgggaaatgtctgcttgtcaatgccttaaaataaaaactagcactttcattaacatttctagactcttaagtgaaatatatgtcttcacttaagttatagaagtttaatatacttcttgtcatgaacaggttaaatttaaactatttaatctcattttatagatttattttaaaatgatagaacaaaataatattttgaaatactaataataagttcacattgattcatttttaacatcccatttcaggttttatgagagagtgacaaaccctaagtggtcctgctcttaaacagaaagctttctttcccttttttccagtttttttttttttagttttcgagttgattgcatatatttaagggtatttcagatcttttaataaaactgaacaaactctaggaagagaccaaagaacttttttatattttattacctaaaattgtatggccagtattttattcttggatatgtaacagacttgggcatgtaggtgtagaaaagaaaagccaaaaatgttaatgcagtttttcctactgcttaaaaagagaaggggttaatgttttgtattatatgtaatttttgtgtagctgtattctttatcatgttgtaaggtattaatgtgggtttatagtaagtatgaaaactaaaactattttgcaccttatactgttttgaaatataaaaaatagtagagaacagtgggtttctgaggttccttctttataaagaactctgcctgcattcagttttctcattaatttgagtaaattttgtcctttacacagaaagtgagaaaaaagtcttgagagcaaaggaaagaaaagttttgggggaaaaaaaggactgccattttttttttttttttttttttttttttttttttttacttttaagattctggagtgccttactccatttttctgaccagtctccatttttcttagttttgggactaaagatgctacagagtattccaggtataaaaattgccacacaaacagacatgatggccttttcattgtatgaggaaattattttaatcttctgagaaacaacacagaaatccaagttttaaaattcaagctagacgcacattttgaatattaagcttctttgaatggaatctgggaaaaaaaagaaactaatttgattgtaagggctattctgtgggaggaactgtgctgggaactttgtttatctgatttaattttcacaaccactgtcatttagctgttactagctcattttataaataaggaaaatgaggttcaacctcacctattttgtaagtactgaggtcagaatttgaacccaggtctatctgtcccccaaaagcacattttctcctttgtatcatccaaggacatgtaaattagtctccatagcaaagggccaaactgaatttatcctgactacccatttacattaaaatatactacattggatccaatgtgtatttggatatgtaaaaatacatatatatactacattggaaagaaaacgtaactgggaaaagcacaaggccactcttacaaatcttttgcatgtgtggtcagagtaacaatttcatgaatactaattgatgtggttagtcaagcaaatttttgtcaacttttgtttaagaatttaaaattaaaactttcagatacgttttagcaagtctcctcttctaatagaattaatcatactgaaaattggtttagccatggttttggcacctgcctaccaatgaggtttttttttttttttttttttttttttttttttttttagaaatagagtagcaagtaagtaaaattacattgtaaatacttataagacttatttttaaaacaaacattttcagttaataaaagaacagaaaccgatgtgactgtatacagctgcatttctgttctattggggtatttattgctagttaacatgagagaagaatatacaattaaattaattcacatttccagactgtccatgggcccaaaagagttaaatctaacattttttataatagggaaaacatgaagtcatttttaaaatctcttaatatagaatgctaaagacattgaatgacaaggacttcagcataaacctacttcacatttttcccctttaccaaaaatatctgcgactatggtgtgtgagcccaagaaagttttcttatcttgattcaagtgagtacaaatactagtgagttaaaactagctcctgctagttttacatactagaaggtatgttgtcactggtcaactttatgaatgtttttgagagaaatttgtgttcctttccacttgtatatcaaaggggatcaggtgcaatattgttgaatctaaattttttttaaagtaggtaggtaacgtgtcagtcattgatttgttcagtatattatcctagcaaacaagtttcaaaccctgtcccttagaaattccataattgaagaaaaacattgagattattagaaaaatgatagcacttatcgtagaaaatcagtaatatgcccagtgatgttaatttaagattaactaaaatgtgcttgattttcctagaaaaccagtgatatgcccagtaatgttaatttaagattaatttaaatgggcttagaaggaatttttctcacagttgaaaaccagtaatgttcacctgtgtttgttacacagtaagagcagcagttggttttaaaatgctttgtatgaaaactagaattcatttttcttactgttgttagaaaagaaatttcattttattttccctggaaaataaacatgtctctggaagtttttggaaagagatattggtccttttacttaggaaactgctgaaaatataaacacatatttatcccttttacagaatttcaagttgtatttttaacaggctaattaggtaaaaagaatcttccgtggagatggcttgtatgtgcctgagtcagtctttgtacttcagacgttttgctttataatacctgtggtttcagttcttgtggtatttttactggaactatctaaatattttccccctcaggcttgaaattaccattaaaaactctagtagcagattggagtttatggcagaatttgccattttatgtaatatgaaaatactgaaagcattgagatatttatcaaatctgtcatttgttgaaatattcttagatattagggaattattgaattagactatcattttaatatttatctagatttttaggttattttctttgggattacgttgtttaaattttgattaccgaaggaacaaggaaagtgagaaggcctaagtttcagaaatttttaaatgttaccatttaggttactgatatatgctttttttttttttttttttttttttttttttaagacggagtcttgcactgtcgcccagactggagtgcagtggcaatggtgtgatctcagctcactgcaagctccgcctcccaggttcacatcattctcctgcctcagcctcctgactagctgagactacaggcgcccgccaccatgcccggctaattttttttattattatttttagtagagatggggtttcactgtgttatccaggatggtctcgacctcctgacctcatgatccacccgcctcggcctcccaaagtgctgggattacaggcgtgagccactgcgcccagccaaggatatatgctttttatctgaggatgtatataagatcagtattaatacaaaataacagatcagaatgatctgaaaatgatcagaaaaatatataggaaatggtttttaggaaatgtctttaattttctctgatatcttcctagcactctaatacaaatgggtatagttattaaagcaaaattttatttactcttcttaaaagagcctctttttactaaattccaatcccataaaattgagaaagagacatgggttgtatatattgctacgtgtggaacttgcgtagattaatcaatttatttatttattcattttttttttcttttattatactttaagttttagggtacatgtgcacaatgtgcaggttagttacatatgtatacatgtgccatgtttggtgtgctgcacccattaacttgtcatttaacattaggtatatctcctaatgctatccctcccccctccccccagattaatcaatttaaattaaattaataatttaaacactaaaaatcttaaaattacctagttttttgaatgctgactcttaaatgtacatatgcttaaaattataggcctagagtcttaattacagttttttaatatagggtttgacctgggttgggatattcttttattaatatttcattgacctagactttttttttttttctcaaggttttaggtacttagctagatcttgtaaagtttttattgtttaatactaaatataattatataagataccagataaagtggatgttcctgaatataatatcatattttcattttaaaattatgatggcagggcaagttagccaaataattttgttatgttttgttactttggtaaattgatgtaaattatgctgaatataatttctgttattggcacagacctttcacatatttgaggcccacattagcgtgtgttaaagtgtttaatgatactgaacatatgggaacttaaagagaactgctattcaaaccatcttgacaaaagatctaacagaagcccaaacatagtgaaatcttggtaattagttctgtgttggaccatgttcagaaaagtaggtagccttctccatacttctttattccaaattaggtgaaggtgttctcaaaatgtttcagaatgtaggctgactttggttttcttaggccttgaagcacataagaattctagaatatgtttcaaaataatttatacaatcttaaactgccggataagaaggatctaaatctgccttgttcagtatagtaagcagtagccacaagcagtatttaaataaaataaaataaaatttaaaattcagtttctcaattgcactatccacatttcaagtgttcagtagtcatgtgactgatagctactgtattgtacagcatagatacggaacatttccatcatcacagaaacctattggacaatactcatataaagcattcttcttattttctgtggaagggtatctcaattaggatatatagctattgtcacatactaaagaaaattcccatctcttcatcccttggtaccttaaaaagtatcagccaccacacaggctgtagatctgatttttaaagtatggataatcacaccatgctttaactttgtcttatctgaatgtgactagataaaaagaaaaactatcttctttagcaaaacctctgcttctttgcattttttctcaataacagaaagtcattacgcctccctgcctcacaagaatgtttccagtgttaattacaggaaagatgtattgaaatcgagagcacagtgcacagctccagcctctagagctgaacagagtgtatgccttgaatttggggttatccatatgactaaactgaatcatctgagcaggaaaaaagggatctgtctttgccagtttgactcaaatttgttgtatgaactaaaacattttaaggataattatgtaatcactgtgaagagtaactgtaaatattcatcccaaagtatactatccctttttaaaagttgctttacggtgagtgtgatgaggacatgcaagatatgatttatgtgattgcgttgttttcaacagacttaatagtgaaggggaggtatctgttagattttctattttattcttccaagttagaactgtctgttcaccacacattcaaaatttttcttaacaccattcttagaggggaaagtataagtgcttgggaaaagagttggtcccatggtagctactgtgagcttggcattctgaaaaggaggatagaattctaaagaaaatatctaccacattttaatagaacatcttaaattacttaattttaccctttttctattctctttaaaatagtttgactcctggtagattttaattatcttaaagcatatatattcctttctcttaattttaagatcgactgtcatgatacaaaatcatccttcagatttaaaccaatgattagatcattaactaggggaaaaaaactggcatctatgttcaggtgatcagatgacataagcagtctgattttaatttgtggccagtactgattgtaaccaagagagacttgctctttttgtggaattggctgactatttccctacatctggagttaataaagcctttgagaccacatcagttgtgctttgccgcaagaagtctttgatctgaaaaatcaagactggcacaactgctgcttcataacattgcatctatgtttttgcaagctatagttaagataccaaaagtaaagttatttagcttatttagcctgtgttagaaatgctggtaaatgtacctctttgaaagccatatatttcaaaacattcttatgatgaaaattttgaactcgtgttaatacaaaaatgatatagtaggatttttttttgccattttcatttataaggtctgtcctttaaaagtccattgttttcaaaatctgtttgaaagaaatagcattaaaaacaaactttacctctaaaatgtgccattttctccatacaacttcaaaatttttgcgtaagggaaggcaagtctctttctgtgctttgtgtggtttatcttagttttcttgctctccatgacaaccgtgaataaaccattttctgatcagcatattctcttttatttagcagcgatttgtaaatcaggaaagtttatcctttgacttccttttgtaattgtaaccattttcaaaatttaaaaatgtaagtatattagtgtgtgaaatacagcgaattgaatgggaataaggataaagaaatataaattgataaattatgtaaaaatttaaactgacaaattatgtccatttttgtgtgaaatgacacatcaaaactggagtgttttcataattatcaagtatgagagactgacttactgtttcagtctataacctggataaaattagagaattttatatttcatacttacatatcaaggatgatgtgtatagtaagtgcacatttgtgataaaaagcatgtgttcgggtgctgtcttctaaatttgattcacattgtactttctggctaggtctgtggatttattctgtttttttgttgttcatggtttagcttggcttgaggaaatctatatagaaaggggacagagaacttctagctagggctaagtttagaagatgaaacttgattaaaagaaaatagtccaaagttcctttcctgaaaaccttatctgcctatcagcctgtacaatacattgcagacacattggtatatagtcagttattttatttcaacacaatcatttgtgaaatacctttaaaccagaaaagtatgcttatgaggaacaaaccattttatctgccatattccccaaactaggggatccttctagatgattcttgggaatatactgtatcttttctaagacttctcaggtaccacagatgtgtgtttttacctctgggatgtgaaaggtaggaaacaaacctgaatgccagtccatttaaaaaaaaaaaagtcacctgtgctagtattatcaggactagcacgaagagtaaaaattgactttttaaccttttatttagaataaactgtatatataactaagctcatgttagacgaaaactgtaatgaacagcatttgagtagtgaacaggtaatatttagcaacataactacttctgttagaatgaaaggtgatactgttagctataacttattgcctgcatacttcgtacaaggcactgtgctaaacattttatatataatttcatctgatctgcccatcagtctcctcatgcaagtagtgttaacaccattttacaaaagagggaattgaatcttgggaagattagggtaatttgcaaggggtctttacagttaatacctccaagaaagaataaattaatataattgacagtttatgtaaataaaaagttgggatcccattttaatctgggtgcgcttccttaactctttttctattattagtctatagaaatatatgcttggggtaaaatatcaaattatgtagaagaacataaagtaaaagtcttccttcccaattcgaagtccaaagaggtaaccattattgagtttcttgtgtgtaattctagaaattttctatgcttatgcaaacaaattaatacatgatttttaaaatacatgcttccataatgttaatgttattctgtttcagtcaacacttaaaatttttattttgttgaattttttgtatcatttcaaactaaaacaaaataatttgtttgtttcatacactgctcataatagcttacctttctcttcttcctgacttctggtttacttctatagactgtgcatcactttagatattatttgttttccacctttgtttcaatagttatgagaatagtgtgatcacattttgatcattaaggttatttggctgcccatttagttttccagaggaatgcaaatgttggccatttgctaattcaaaatgtttatagtttgcttatctaaagcaagggtttatcaaaggaaattaatactgctctaacaaattaaatgagatttttcttaaagctttgccagacttgaaagtgtactggaaatgtgtttttaatttatttgctaactctaccaagttaaggaagttcctgaacaattgtgttgtgcctttgatagttaccccttaatagtaacaaagatagcaatgtttaatcaaactcatgttgattttatttggtgaatcttgtaacactgaaaagaatgaattttatgaacccagattttatgttatgctatattgaaaggacatttgtttgctcgatcagattttgaatcctgagcctatgtgaggtttgtgtttggtaagccagctcaatgcttattcagtcacttggtgtaactgtcataccaagatgcattacagagatatttagagtagtagttttccctaataaccagcttaaaaaaaaaaaacatgtggatggtaattaagtttgacattatttatgtggatttaggcagtattcttttcatttgtggtagccctttataaaaattagataggcctttttaagccccttacagaatatagaactcattttacataagtaatatgatagtcatttacattttaattaaatgtgctgtttaattttaaggtatatgcaccatccccaaattcagatgatttcaaccgtgaatctcctagttatccatctcctaagccaccaaccagtatgttcgctagcactttctttatgcaaggtaagtactaccaaacaattgccaaatactactgcagtcatctgtatatcagccagtattttaaagtattaggaaagagaatacctatattcaggccttatttaggcattttttttggctaaattaaaatttagctttataattttccagtggtgtttattgctgactgcaatttaattgaattatctagcaaaccattggagtgctggtccagtattgattgaatttataaaggtcttaaattgagaaaaattaatagagctgttcttgctcattttagaattgaaatgtatgaaagctgttaactctagtttcttgtttaatttatggattcatatcatgcctagaattaccaatataaagaaagagtgaatatcatagaacagagtaagacttgttaagagagaaaaagtgttgcatttcctttaattcatgtctagcaaatcatttttatttggtctcctgtggttttggactatgggaaacaaatatatgggagcaataaattattacataaatggttccttgactttatattgttgagtggagtcattgctgacacatttcatttgaaagctaactataatatggtaattatcaattacttagttttactattagaaaaacttctttgttccacagtttcaaaatgtttgatataatgcacattgcgtgttatgcattaataactttctgtgtatgtataagtataccacttaactaaaaataaatctagcctattcccaaatttggaatttttactatcttccttgatatgaattgagatcttctgaagatttttataatggcctgcctattacagcttagattacttttttccctaactaaaatgttaatttcttctttttaaatagtaattttacagtttagagggaagaacagtgggtagaagactaggttggaaaagggaggaaaaatatctggagggtaccccttgaatttttataagcaacatcaaaatacaagaaaatttttagctaaggaaaattttatatttctctttttgtcttagatgggacccacaattcttctgacctttggagttcatcaaatgggatgagccagcctggttttggtggaattctggggacctccacttcccacatgtctcaatccagtagttatggcaaccttcattcacatgaccgcttggtaggctataacacgtgactagggtacagcaacactttgtcctcacttgtgtttctttttggattagaagtgtaaaatctaagtctgccaaaacttctgaagtttgaagtacttcaaggcttaccgcatttaccatgcctttctaaaaaataaatgacaataagtagtgctctttagctgtaacttgtaaatgctctttttgacctgttatcatagttgtccattttatgtgaatattattcagaaaatatatttaatagatcatatctctttccatctagagttatcctccacactcagtttcaccaacagacataaacacgagtcttccaccaatgtccagctttcatcgcggcagtaccagcagttcaccttacgttgctgcctcacacactcctcccatcaatggatcagacagcattctaggtgagctttttgagttggcaaaacttcctaaaagtttgtggactttcagtgaccccgatatctttatatatatatatgtatgttttatatatataaatgttatatatatgtatatatgttatatatgtatatgtgtgttatatgtatatatgtgttatatatgtatatatgtgtgtatatatgttatatatgtatatgtgttatatatgtatatgtgtgttttttatatatgtatatataggtatatatgtatatatgtttgtgtatatatgtatatatgtatatatatgtgtatatatgtgtgtgtatatatatgtatgttgtttgtttgtttgagacagagtctctctctctcacccaggctggagtgcagtggcacagtcatggctcactgcagcctcaacctccaaggttgaggaggtgatcctcctgcctcagcctccccagtagctgggactacaggcatgtaccaccatactcagctaatttttttttactttttgttgagacagggtctcattatgtggccggggctggtctgaaactcctggcctctagtgatccttccacctcggcctcccaaaatgctagcattatagacatgacccagcacacgtggcctctttttttatttttattcatttatgtatttatttttgagacagggtctcactctctcagctctctcactctgtggctacaacctccgcctccaggctcaggtgataccccagcttcagcttcccaagtagctgggactacaggcacacaccaccatacccagctaattttccatttttagcagagatggggtttgtccacatttctcagactggccttgaactcgtgggctcaagagatctgcctgcctcagcctcccaaattgctgggattacaggcatgagccaccgcgcctggccttggcccctctttcgatatattttttagtgttgaatttaaaagtgaaagacaggaagacaagaagcttttttattatcatcaatatagacactggtaaagacctcatctttagtttattaataagtacaacacatgtagagtatttcctagtttactgtaacagatgtgagatgatgatagagaacacccttggaataatggcagagtgctaaaatataatacttgcttgtaaaattcttgatttatttctctatgaaatatccaggaaccagagggaatgctgctggaagctcacagacaggtgatgcacttggaaaggctttggcatctgtgagtattgattttacacattctactgaatgaattttacactactgaatacagtgattagattttgtaggtgataagtatctaaagagtatagatgtaacaagatcaatttcattacacatttagagttattctcggtttgtattgatatatgcccttaaatgctatgcctgtggtacagcaaatgctgggaagaggaaaaagaagtcatctaaagcaccaactgccaagattaatcattaaatctatttcttctaaatacatagttagtaagtggcccattaaaataagtcaagtggaaccacgaaagataactcagtattctgatccagagaatgaagtacctttataagaaacttttccaagatcaaaagcattttatgtactgtatttttttttaaagtcaactgcacctgatttactcaaggaataggaaatgagagccttctccccaaaaaagccagattcattgaagaatcatgttaaaatgagtaaaagtgatttgaaggaatccgatagtattttcttgagcaactagttcacatacatcacttcagaacattaatgacaaagcagtgattatattttaatatctgattcttaaaacattaaaatctcctctttcggaatgccaaaactagaagggagagcagttttcagtaaatctacaacagtttcaaatctaattatttaaaaggggcacttgtgctttgcgcttcctaaaatttcactttagatgattttttttcttcttgttttctgagtagtatgcctcttagaattcccacagaattgtcttttattttctatgaagtgcaattaactgtcagatacatttgttgccattcatggagaaggcagagcacgttaatacctgagtggtaggaagcaactgttgagcatttaaggagataaacctctttgtatattgttggtgtaaataaatttttctctacagctgaataccagcttcttggaaaatgaagccaagtcagactcatttactacatagtagagatggagcacacacaaaatgcagctcagtgaatgtttgttgaattctgtcttggatcatataataataatagtaatgataataacaaaacccacaaaatatttcagctataatttgaatgcgcacctatactgagcatttacatgccctgtttcatttaatcctcaagaaagccctgtaaggttggcattgttatccccacattacagatgaggaactaaggtttaaaaggtgaagtaacttgagctcagaaagattaagcagctcgccctaggggaatcataagctagcatggataaagcccatatatattagaaccctgatcagaccagcttcagactctgctcctaaccactgctgcatacatccagaaagtgcggtgctgtggtaattatcttacaaggtattgatgagaatgaaagaaaattgtctcacccttttttcgacttactgtcacctgatgaaaatgacctatttaggaagacagttttattctatactaaacctgtaaggtctccaggtatttgattggcttgccatattccttctcctgattctggaagagtccagtaactgatattttacatgtaacaggacaaataacatttgaactttcagtgctagataattttttaaaatttaacctgcattttgggggctttttttctcaaaggtcatttgtttgttttattaaagaaaacttctatcagggaaccttggcctacaggcaggcaagaatttgtgatgttctcagtggcccttcaagttcattttgttacccttcacatccttgagtatcttcccctgttataaacagcatactagccaaaccaaaatggcatttggaaaagaaaacccaaattcaccgtgaatggaatccagtgaagaaatgtttaatctagttagtgggtgggctttggttgtcatggaaactcagctctgtcatcctgtgttgttactaggcaggagcagccaggtcattccataaatcatttctgtcatagctgacggtgatgcattccatctgctccatcactgcatgccatagtctgcacatttcaaatcccttccttcaatccatctgcttccccacttcccagccggacacctccccaaatacattctttttccaactttccttacagactcgcattcactttaatatatgtttagtgcacttaaaacgtactgaaaaagaaaaacattacattatctggggataggaaggattagaagagatgaggagaaggaaattaatgaggattacttttgagagtctgacatgcatatcataattttatgtcaggtattatagatattttgaaatggtgactgactcttttgaaattttaagttctttagaatgtgacgcttttaatatagcctctggttttagatggagaaacactatgctattgtcattaaaaattaattctatttccccaattgtctaatatatgtcttaaaagatctttcatattgtgaaacatcagagggtacaacctttgttcttcagtttaggtattaaagagcacacagaatactgtgtgattaaacatgtaaggccagataatgcatttgcaaaggttcctttattttaggtttaagcctgcataattgtggtcttaatctcaggatagcaagaaagagaattgtacatgaaagtatttacacaaagttcccaaagccctgtggattatgcattagtttagataaaaaaaaagaaaaaaaaaaaacctagggtagatagaaggaaaggaaaatctgggtattcgtgccatttctaatgtgtttccctgaacatttgccagacaataaccctttaagattgtgcccgtggagagttatatagaggaagaaacatctggtttctttcggtgcctaataccatatcaaaacacttggtctttaatttagaggagatcaaacaagaagactgtttaactttgttgattatatcagacttctttgtgataatttatgttttgatttctacctcagagcaagggaaaaagagagagagagtgtgtgtgtgtgtgtgtgtgtgtgtatatgtatgtgtgtattaatctggataaatggtcagtagtctctaacaaaagaaaagaaaattcagggaagttgatgtttaaaagtaattcatgaaataactttctttgttccttagactcaataacattagcataataaagattaactgaaatgtgcactgtagtgtttaaaaaattgggctcacagttccggggttgggcttgggagcagtccattgtttcttttttgtctaaagcccttttcattagcctctggcttattggcaccctgctgattggaatagaccatgactgataggaggaggagtctcatttgttggagtaaaatgaggcatattaccgtttaagcctggcagaaggcattgggagttattcattattggtcatttaacagtatgaggaccatggactgcatgcagaatgagtgcttactttgtttatgctctagactctaaatcactctttacccccatttttttaagtaactgattttgttcttctttttattcttaccttcaaacatcaatgtaggagttcttttaagtccagaaagtatgaaaagaaacatattcctgatttagaataaagccaaataaagcctgtgtttagaagttaaagtagcacaatttttatagaataagtatgatttgtttgcgatttggtaataaaataaacactcagagataaagcttagtgaaatgacctgtgatccaaaaggctgtgttatcatgcttttcaaatgttgtattgctcctcctctcccaccatacacattctttttatgaaagtaaaagtgattttttaaaaagtcctgtaacttacagggctatctgtaaatttaggaaaagtattgataacaattctgtctgtcatcactttaactggcaaagtagaaccagtgactgtgatggatgagtggaaaaattggcttttattgtacaaatggagaagctgcttttggaaaaaataccagaaatgatatatttttatacttgatatgtttttggtgctgtttctcccgtttagacagtgatttttttttttaagtttacaccagttttacatatagcattggggcatttcaccaagtcatttaaagatagtgctcttatatgactctaaactattacctcttccttccttgatataaaggagctttcaccagttgttgacatggttagggattgtttaagtgtaaggacagagttttcagggaaaatcgggattggtagtccatttctaccctcaaaagcccatgcctacctaacagtgtgatatggacagcttagtacatcaacactaattcccagaaatagtgaaacctcaccatatgattattctcaaagcttatgccataaaactgatttgaaattaagtcatatttataacaagctcttttgcccttggtatttctgttgctgacccacattgtataaataccaagataaatactaccatttattgagtcctgctttttatcagttagtattatagcaaatttcaattgtagtttaatcactcaagttaaaaatatatatattgggcacctacttttacaagatactggcatacaataatggattcaatgttgaccagtataagtttcctgtcttcaaagagcttgtagtcaaggagagaagacagatatacaaataatgataatgtataacacagtgtgaagtaaaagagcagagagaagttcagactattttctaagagtataaggaaggtgaaaatgtataaatggggaagtgacattggaactgagctttgataagtagaattccatctgggagaggttaagaaacaagcgttctgaaaggaggacaagctgtgtttagaaaatgaaaaaaatattttgtttgcataatagggtatgtaggttaaaagtagactataagggctaggcaacaccacgcctgtaatcccagcactttaggaggctgaggcagtgggatcacctgggtcgggagttcgagaccagcctgaccaacacggagaaaccccgtctctactaaaaatacaaaattagcctggcatggtggtgcatgcctgtaatcccagctagtcgggaggctggggcaggagaatcgcttgaacccaggaagcagaggttgtggtgagctgagattgcaccactgcactccagcctaggcaacaagagcgaaagtccatctcaaaaaaacaaagaggaagaaaaattagccgggtatggtggtacacgcctatgtaatcccagctgcttgggaggctgaggcagtagaatcacttaaacctggttgcagtgagccgagatcgtgccactgcacttcagcctgggcaacagagcaagactccatctcaaaaaaaaaaaaaaaaagtttttgaggacagtagttcagggcaattatgtataggatggaaagagaggggagtaactagaaatataaacacttaagtagtccagccgcaagtttgagtaaagatttaaagtggtgtcatggcagtgattatgacatgtgcctgtcccagaaacattagagaattgtggatatcggtgtctccagagggaagggtagagtggcagaggaaaagaggagagagtacttatggtaaccataagcatggtgctactaacctaaatagaagagtagagatgggaaggatgggaagcttggggtggtgataaaaaatttgggtttggacataactgcgcttgagatgaaaagagatcctgtccagatagaaaagtctagcaaccagtgtgacaagagagataccaatttaggagtcatacctggatgtgatagttgatatttgacaaagaatactattaccaagagataaagcacagggaaatgaaagaatactgagactagaactctggggaaacctacattaagggaaatggaagagtaaaatagagatggaccctagggactttatcaaatacaaagactgaaaagaatcacttaaatggaaattcctggcaaggattatgcttttcattcttaatgacaactgtatatctgtacattgaaccctcaccatttatctgcactgttgtggaatctgaggctacattaataagacaaattcctcattcttctggggcttatattttaccatgggaaaggataaaaaaacaggtaacagacaaatgtagatgattagaaatacagtgtaagcactatgaagaatacgaaagaaggagtatgtaacagaaaatgctgcttcatgagttgggctagttgacagttttgcatagaactgacgatttctcactcatccatccaccatcagtgttatcagcctttccctcccttgccaatattgtagtcaagacatatttcataaagatgagcatcaattgctcataaatggtataattatttgaattatgaacataagaaatggtggttttcagtggtaaagaggtatgttgagggccgggttcaatggctcacgcctgtaatcccagcactttgggaggccaaagcaggcagatcacttcagcctaggagttcaagaccagcctgggcaacatagcggaaccccatctctacaaaaaatacaaaaatgttgggtgtggtggtgagggcttgtagtcccagctccttgggaagtcaaggtggaaggattgcttgagcccaggaagttgaggctgcagtgagccatgattgcaccactgcattccagcctgggtgacagagcaagaccctgtctcaaaaaaaaaaaaaaaaaaaaaagaaagggaaaaggtatgttgaaacatgttttgtttctgttgaagtttgatgaccttccctaatttacttatgtggttgaaataaatcaatgtatgtgtgcaaagccactaagaacaaaaatgtactttcccaagctaattttcccatgtgtccaatgaatgttttaaaaggtaacaacttaaaaaccaataatattgattttttttttttcatacactgtcttactctgtcacccaagctggagtgcagtggctcgatctcggctcactgaaacctccacctcccagattcaagcgattctcctgcctcagaccccgcgagtagctgggattacagtcgcccaccacgcccgactaatttttgtatgtctagtagagacggggtttcaccatgttggccaggctggtctcgaactcctgacctcaggtgatccacctgcctcggcctcccaaagtgctgggattataggcgtgagctaccgcacccggcctattattgatcttatactacctctctgttactagatcctcccaaagtgttttgaactcttttccatagctttacttttccaaaatagctttttaaatagagtatacagtgtctagatcctgaaaatagagtatacagtgtctagatcctgactgtttgagatagttgatgtataaaggcatttacaattataagttactaatgtcatacaaattggcgtattttgtttgaagtgcatatatccatttgtagtcaaaggaaggtagactttgggctgcttacaatttgaaagcctgttacctttttaaaaaatgaaatctggtgggccgtggtggctcacacctgtaatcccagcactttgggaggccaaggtgggagggtcatctgaggtcaggagttcaagaccagcctgtccaacatagcgaaatcttttctctactaaaaatacaaaaattagccaggcttggtggcacgcggctgtagtgctaactactgggaggctgagcggggaaaatcacttgaacctggtaggtggaggttgcagtgagccaagatcatgtcactgcactccagcctgggtaacagagtaagactccatctcagggaaaaaaaaaatgaaattcgtaaattgtgacttgtagagttttgttgtatatgaacctgtcccaatatctggctttgtcaaatcttgaaagaacatttttatgctttctttaaaaacaatgttgaaattccttgtatgctgtaaattgggtctctttaaattcattagagctcttaagtttattcaaagcaaggtcatttctactggatgactttttgcactcacaagtagttttcctttttaaaatatttgaccacaatttatccatataagttggtttgtctgccctgagtgctgagatacgaaaatgattattatgcatattaaaagaataggattgtccaagaagagatcttagggatgggcctttggtgcctggattaaggggacttttaaagtgtttactgttgttgccaggcaccatggctcacacctgtaatcccagcactttgggaggccaaagcgggtggatcacctgaggtcaacctgaccaacatgacaaaaacccatcctaaaaaaaagttagctcggcatggtggcatgcactcgtagtctgagctactagggaagctgagacaagagaatcgcttgaacctggcggggtggaggttgcagtaagctgagattgcgccgttgcactccagcctgggtgacagagtgagacttcatctcaaaaaaagtgttcactcttgaattagatgtacttgaattaatctctgtcaccatttatttttggcaatatgaaatatatataaagtattgcaataaaagtttgagccagaatacctaaatttatgcatccgataatttatccttttcaaagtagacctattaggatttgaagtccacaaatcatcttggaaacagtttttgaagcataacaggattttttcactttcttcaaggatgacagagtatcttctgagaataagtttaatgttttacaacactcaatcatttggagctaaaattggcaaaaatgtggttgatcaaactgagtaactttttaaatgagagataaggggtaactattaaaaagattattttctttgtccagcctttaaactgtccataaagaccattctaaaagatagtattaatagctttctgaggtgattatttttaaagataccacttagttagataacatattctagaaagattgtcagatttgttaactttgtagatacttctcctttttctgttctaacagaaactttaagttattttcacctagaataataaatacatgtgatctattttattcctcttgtattagactatatatactttttaatcctgttttttaaactgaggcttctgtatgatgaaacagtctaaaacttgacaagaaattttttcactctgaagtcttaggggtgacaactagattataaaaataactccatgtgaacggatttgtgtatgtgctgttgtcacatgttgatacatgtatatttcttgttttctggttagatttattctcctgaccataccagcagtagttttccgtcaaatccatcaacaccagttggatcaccttcacctctcacaggtaggcttctgttttatctacttctaactggtgggactacttggaaatatttctagttcatttatttctcaacaaactttaataaaaatttgtgaaaaatcatttagattttgactataagaaagtgtgtaaagagagccttcctcttgaattcattttggagaatattgaaatatttgctagttttgagttatttattaatatcttccctgattcttaatgtaatttgtgatcatttctaagaacagtagttacaacaggataaaaataagaccaggcaattggaatgaagataaaatatggagaaagaatgaaatcaaaagtttttctaaagttattttttttagagacagggtcttactctgttgccctggctggagtatagtggtatggtcttggcccactgcagcctccaactcctgggctcaaatgatccttccacctcagcctcctgagtaactgggaatacaggtgtatgccaccgtgccaagctaatttttttactttttgtagagactgggtctcattatgttgcccagcctagtcttgaacacctgagctcaagcaatcctcccaccttggccccccaaaatgctgggattacaggtgtcagccgccatacctaccccccaaaaaatggtttttataagatagcatgtaaaataaacaagattaatctatttaaaagtacatgtaacttcctccttgttctccacacttgtcatgtactacgggtaagattcaaagatgaataactatttctgctagatagtctgtttttatttttaggtcaactaagttatttcccatagataaaaaaattcttgggaatgatgtggtttttctgccgaggaaaaaaactctctgtgaaggtggatgaatattgttagtggagataagtggttcacatttgtttttgttttgtttgagatggagtctcactctgttgcccaggctggagtgcagtggcataatctcggcttactgccacctccacctcctgggctcaagggattctcctgcctcagcttcccgagtagctgggattacaggcgtctgccaccacacccggctaatttttgtatttttttgtagagatggagtttcaccatgttggccaggcatgtcttgaactcgtgacttcaagtgatccacctgcttcatccttctcccaaagtgctgggattacaggcgtgacccactgcgcccggcccacatgttttttttttcttaatattttttatgttagtttagacaagttctaaatactatcctacagtataaatttgtggagacatgattgatgttattgtaaacgggattttttttatttcttaggaataaatataagtatataaaaatgtttaatatcttttaagctataattttaaaactcgaactatatttttctgagcagtgtttggagaaaagccttgctgaagaaaaaatatgttagattgttttgaggaaaaggcatttggcaactgggtaaagttaccatattcctccaacaacagttggggaaataattctgttttcctaatcaagccattagttaagtccatgcagttttgtgttttgttgttgttgttaagcctttttgcactgtggccctggccatcacctatgctttgtgtattagccttgtggctctactaagaagcattccggtttggggatgatgaactgctggcagctgctttcagctattagcaggttctgccactctctcagacaccagggcttcagctgtctagtaaaagttaaacagctgttccccacatagacaagactatgaaagacccattgacttaaagatgttgtttagcagagctgaaattacaggaagaatgatgtaactctaaccctactcaccctctttgcacagttctactaaaattatcaatgtcatttttgctacagcttgtttcactttctcatccgaggtttccatatcagcattcccactacctctccttgtctgtgtagtaagatagctgccaaagtatcctttggttttaatgaacactgagtaggaaggcaggccatggcagagctcagcatctatgaagggtcatcaatgaaatgcagaatccaagatttagacattttccaaaaaactagtggtcacaagtaaaatcttacatttcctccttcatctttatttgatatttaatgggcgatgctgtctttttctctttaattcaggttgttaatgaaaatctgggctgttgaattatgtaatgaagccttctttttaattcagcagtcataatcaaagaaaaatactttcacatacttgtgttgaaacagcaaatcaaagactgattttaggcaggtgcatctctcctggctcctgtgtcttggttcttatctacacacacacacccttacccacccatagcagggcagagatgagatagaaagaagaaaggaaagcactgtgtgataaaatattcactgtcaaagggaaaaaaaaaggaaaagaacagagcaaaccagagctcctatataaatatgtggacattattttgcatcttgtgtggcaatggcctgttatctagagtaaaaaaattctacccactctgtgagtagaattgtccacacttgccctattccttatgtttttgagcatcagttagacttagcacaggtcttttaaagatagatacacaggtgcagagccacataagcagcttctaaggccatcattctttaaatccccagtgttttccttgggaacttttcaggtcaagagcatacatttctacatagagagtgcttagaaggaaggttctgagatattgtatcagttaggatgctttaggctaaaatgaggagaaactcttgtctcagctagtctgaacagtaagaggatttattatcttgtgttgtgaggtcctggccccctatgtcagggctcctgctctactttgcagttcttcctcaggctggtagcaagacagcagttcagggtactacatgcagacataatctccagtagatgaaaaaagaccgtctctctttttttttttaaagttaaaaattccctatttttttattcccagtaccactaccacagtttacagggcaatatacctgatgtagtgaaaagaaaaagacgaagctacaacagatgaaagacctcaggaatatacatcttactgacactacattgcattagtcagtagctgcactttttgcaaactggctctgacagtcctgaacaagaatggtttcctgtttcagctgcagtaacttttctgactatggatcattgttccttctgtggcagatttttacagttcctctaatgcctttcggacaactgtctcaaagtaacctacagctttcctgacaactcctcgttctctctcctgctaagaactgtagcccttttctgctgtttttagaaccttctgctaccatatccaccactttcaccaccatggggaatgcctgagcttcttccaccaaaagtgccccctttcatgggttcatagtttgattgctgttgttcactataatttccgaactcattatagttcccaccaccaccgtagttaccaccgccaaaatttcctccttcactccaccgtcactccaccaccaccaccatatccttggtccatcaccatcatagccccctctactactgtaaccaggactaccaccatagttgccaccatcacctccaaaaccattatatccgccatcacctcctccataactacctctgctgccaccaccttcaccaccatagcctcctcttccatcagagtttccaccacagccaaaactacctctaccacctccaaagtttcctccataataaaattgccagatctacctctgtgacctctgtcatccagcagactacatctcttgtttagaaagggccttttttacttcacagttatgcccattaatagtgtggcatttctgaacaacaattttatcaactgtatcatgatcatcaaaagttataaaagcaaatcctgtcttttttccactctgcctgtcttccataacttctgcggtttcaatcttgccatacttttcaaagtagtctcttaaattatattcttctgtttcttctttaataccaccaacaaaaattttcctcactgttagatgggcaccagactttacagaatcctctatagaaagagctctctttggttccactacacacctgtcagccttgtgtggtctagcacaccttgctgcctccacctcttcaacacaagagtaagtcacaaaaccaaagcccctggaacgtgttttttggggtctcattaccacacaatctgtgagtgtgccccatttctcaaaatgtctcttaaactatcatctgtagtttcaaagctcagaccaccagtaaaaagtttttgcaaaagctctggttcctttgaatcatggcccttctcccccaccaccccacccccacagtggtggcaacggctgcagttgggcagcggttttacctccattttgagaccagacaactggactcatgtcttccaactcaagttcagtatcccatctctttcttttgagagtcttttaaaaattattttaaggatccttttccagaagcctcttaaacagatttccccttacgtcttattggccagcactgggcctaatgcagttgcttgcaagagaaatggtgccaccatgtttatcttagcatctggatttgtccctggggctaagaatagaattgctctctcctggttcctattaggaaaggacagacccacctcccacaccccttgtgaacaaaatcagtgctctggccacaagatagaagagaggaatggctttgtttactacagttgttatttaggaaaagatgagcatttgcagtaagagaataagtttactaagggagcttggaaggcaaacaagcaaagtcatcctttgcctttcattacctccttctggaatataaatgaataaaagttcaataattgtagtactcagtagtaatcttcagagctttcacagaaaaaaataataaggagagaaagagaaattctcagtttcagctaatcaatgagctacttatttttattacctgtcagattgcctggtgttaagtcagttacctgacttcagcatgctttaacaaagtgcgttacactggaacgggccagtctgtaatacaaacaaaataagtttaagtgtatgtatatttttttccagtttaatgaattacacattgaagatagacctttgtacagtttttttaatagcaccaaaaattatgtagatgattacccaggtaattcagtgtgcacatcttgattcctcaatattaagctaatgaacaatctcaaaaacagcctgttttgcaaaagcagatgcatgctgacaattctgaggcatttgaacgtaaaacgtgttaatattgcacacaaagtcagtaatttgatgatcaggcttctattacgggggggcttacagaaggagtagaaaaaatgattgaaaagtaaaatattaccaacattaagataaattcttttttaataattaaaggtatttttcaaaatcgattatgattaacctggtcacctaaaattcataattctgcatcagtgcttagaaagcagtaatgcactgaaatcagcagtaaggtgttggctagttgtttttatatatttttcatatagtcagttattgagattttctggttgattaattctgccttttaattataaaattagcccacaagcttttgtttcaatgagcaattttagattgtccataatttgtagttgatttatgattacatttgtatgtctagcaggaagcctttaatggtccttaaaataatttgtttataatttgctcataagtaaaaaaaaaaaaattaactgaagtgcatattttttctcacaattttagtatttaaagtatatttatgtaattataacagtatgcatataattgtgaaatctaatcaggttatgaagaatctgtatccaacttttcaacttgcaaaatgtgtataattgatgaatacacttactacattgtttcataattaaatagtcttgttcagctaaaatgaactataatagttctaatttacctcaagtttttctaagatagcaaataaattgtagtgtcacattagcttcctaagtaaggcaaattgacctgcaataaaaggttctagtgtgagacaaattaaaccttcaacttccaacttcgatttctaatataattcaaattgtcactgaagcttttattaagaataaaaatatatttagtctttattattttctgtaaatgacttattttcagatgcacaatcgtgaaataatgaagattttgatcagttgtttttgtctttttcctttgaaaggtattttcgcaagaccattaaaacattgccttctctctaacatatggatgaattatttttttatgcttcttttttttcattctttatactctgaacttgtatcttttctttttctatctttattttttaaattagatttatacctttctaacatcaaaggctaaacaacatctaacaagtttttataacattttcctaattaatgtatttggtataaactattttgggaaattttttaatagatgaccccaagatcatttacagtcatgggaaattcattcatctgtgtattgctaaaggcactgtcagttactattaccccttagtaaggcaatttgtccttacgttaatatatttataccctttgattcagaaatgctacttatcctcaaaacatccttccccctgggggaaaaaaactcaagagtaatgtttactatatcactgttcataatagccgagtggtaacaaccaaaatgtctagcagtgaaataatagtggctaagcaaattaggtgtagaagccaggcaaaatggctggcacctgtaattccaccactttgtgaggctgaggcgggtggatcacttaaggtcaggagttcgagaccagcctggccaacgtagtgaaacgttgtctctactgcaaatacaaaaattagcttggcgtggtggtgtgtgcctgtaatcccagctacttgggaggctgaggcaggagaatcgcttgaacctgggaggtagaggttgcagtgagtcaagattgtaccagtgcactccagcccaggtaacagagcaagatgccatctcaaaaaaaaaagaaaaaaaattagccaacgtggtggcacacacttgtgatcccagctactcgggaggcagaggcaggagaatcgcttgaactcaggaggtggaggttgcagtgagccaagatcgtgccactgcgctccagcctgggcgacagtgagactccatctcaaaaaaaaaaaagaaaaagaagaaacaaaacccaaaaaacagactaggtgtagagaataagggaaataataatgtagtcattaatagtattatcaaaatttctgtacaatgctataggaagggggacagaattttaaaagtgtgtacattataagtgcattttctcaagatacataggcatgtggactaagtctaaagaatgtgcaaacataaaggtagctgtatttaaaattacagggttttttttctgttttctcagcaccccattttttttattaataatgaaagattttttaaaatgtgttgggcttataagtagccaatactatgctgaaggccaaacaaaaatattcatgtaaatttatttagttattgagtatctttaccctttccttcacaacattatcaagatcactgagttaacccaggtgtgtggctacttttgggttttaacaggtaccagtcagtggccaagacctggagggcaagcaccttcatccccaagctatgaaaactcactccactccctggtaagagcctcttatacatcagttttatctgatagcttagagtttgtttgtttttggtcaatctggcataacaataaagaaacagtaggctagcattgcacatgaattctttgctaacaaatggctgattcatttgaacaatataagacacattgggtatgccttttgccatctgttctttgggacatcaggcttctggtgtcaggacagctgatgttaaaattgtgttatgagggtttttgtttctttgacaaatctagggcttaatctttctatgcttctatgtctacatataaagggaaactttttttaaaaagacaagtaaaagcaagaaaatttaatccagcaatgcaaaattttacccttttgtattttacactttctcataatactgtgtgtggtttattacatttccattaaaaattttaagtgaataccagtgttttttgtcatgaaagtattatttcccatgttttcttatggaaaaaaaagtatattgtgcaaattatacaagcaaaacattatttaacaaggcagtaaaggaaccttctagatatttgagcgtgaagaatttgtgggagaatgttgactactgttgcttttgtatacttatatttgtaacccagaattacacggtataataaaaacacaataaagatgatttgatggaatgctaagtcatgctcttattcgtaattccaggttgcaaagagaaacattctttttctgtgactaacaaaacattttaaattgaaggaacgtttgcttctcatatattttgcaagcaattataagcaatgtgtgctgtttagatgctaaccttgtaacttccctgttgaatcccagccttttcatatcttaataaaatagatctcgcaagtcttggcgttaactttactaacatgttatgctgacatgcatatcagctatttcctcatctcttttggagttaatcttaacctgtgctttgcctcctgttctgtcttgactttgccagaaaaatcgagttgagcagcaacttcacgagcatttgcaagatgcaatgtccttcttaaaggatgtctgtgaggtactatttcttttagatggtgccttttttgtgtttcaattaattatacttcccactattcatttaaaatctttaagctgtacagactcccatctttaaaaatcaaacagttgactgtttcagtttttatcacagtatataggaataattttgtctcttatgttgttgaaagtgatcctttttaaaacagctctactggcatgtgcttttgatttttttaattctaatatgtttgtgtatggggcatgtgtgtatccacagacagacaataccatttatttagttttgtcaaagaacatatctggatatgttcaccatataagttacatgtgctttatatacttaagacaaaattaaaacttaaacttactggatttgaggtcccttccccaaattgccatcattcaaagatcagtattaaagtataggttgtacttttttttttttttttttttggcagctcttattgagaaatgacatagtatccttcattttttgtagaagctaaaagaaataacctcatggtagtttggtaaattcgttttataaagcagtgatttgtttctgaagctttgaaaatttagcataatctacatacatacagcctttttttgttgttgatttatagttcaggtggttgcttttgaagctacttgatactgcatttcacttgctatcttccacatatcacatagtaggaaacgtagcagttaatgaatctaacagatgccagcaataaccaccatgttttttttttaatccatacagcagtctcgaatggaggatcgtttagacagactggatgatgcaatccatgtgctgcggaaccatgctgtgggaccttccaccagtttgcctgctggtcacagtgatatacatagtttattgggaccatcccataatgcaccaattggaagcctcaattcaaactatggaggatcaagccttgttgcaagcagtcgatcagcttcaatggtaaaatcatgctcatcttttttgtagtaaaccctaaagattcttgtcctaaatgtctttaatgaaatctttgggaagaggatctttctgaaaggaaggcaaagactgacttttcagaattttctttactgtctttggcagtaaagtattggctaagtattagtccataaaatcttcttgtgaccttgtgcaaaaagcataagctttctacagagatcatttttagctaaaacttggatttttttccagatgtgtaataattggcacagcagtttttgccttgaaatagtgcataagaaatctgaatagcaagagttctgatctagaaaagttgtttattgtaatttagaaccagccttcagtggtagaaagaatgtgaaactgtaatttatacagatccaaatttaaactttattcccgaactgcgggggaggtagttttaagaatggctgtaatttcagtaataaataaaggaaacaattttagattaatccacaaagagaatttttaagaactcagtccatcttttaaaaaagtatgataatttttaaagggggtgttcgttctacagccatacacatcaaaaattctgtgtttaccatcttacattattttttatccaaattatcttttaaagaaatgaagttctttttgaacctgctattttaaacttataccatgtgttggcatgtttatggcatggtttttaaggttcattgcatgctgtgaaatgttcttctacgaagcagatttttagctataagccatgtgatgaaggctaaaaacttacctatcatcaaaataattaattgccctaaatgctgaaggcttgtattctgtaagatagggttggttccagattttcacactcacatatcttacacatacatacactcatttttgagcctctgaagtaaacgtcacacaaggctgcttgttttctgagaactgtattttcagcagcatgggtaacattagatacctgttttgtgtttgtttttttaatgtcaggaaatcttgaaaatcagtctccttttaaagtactttttattgctattgataagctaataagtgtcaaaacatatgtaagttattaaactagtaaaatggggaagtgtcagatggctcacacctgtaatctcagcactttgggaggccaaggcgggaggattggttggagttccaagactagtctgggcaacaaagtgagaccctcatctctacaaaaaataaaaaaaaattagtctggcacagtggcatgcgcctgtggtcccagctacatggaaggtttaggtgggaggatctcttgatcccaggaggtcaaggctgcagtgagccatgttcatgctactgcactccagcctaggccatagagcatgaccctgtctcaaaaaaaaaaaaaaaaaaaagaaagaaagaaaaaaatatgagagggtattgttatcactgctggtaatagtaatgaaataattttaatggtataataaaaggaatttgttacaaatgtgaatgcagaataacttaataatttgttgaaatactatttatccttatttagaagcatgacttaaaaatcaatattcttgaattttaagttagtctcagcagcaacatttgcagttcttattccttacctcttaatgattttttaattcttcacttttactagcttactgctcctattccaacttatcagctacagtatttattatatatctggctcctcccagttggagtttgcataaaatggaacttctgtcttgagaaagttgtttttttaccaatttcagatattccataatagaaagggagacttatcaaaatgtagtcctccaaagccacctagaaacctagtgcattttagaagactgttagagggaaaaactctttcattggatggcaccctaaaacttataactaagaaagtagctcctactatatgctgaaggaatgcactgcccacttcagaacaacaacagaaggtctgccagaggtatttttttgttgttgttttttgttttgttttgcttttagagatggagtctcactctgtggcccaggctggagtgcagtgccgtgatctcggctcactgcaatctctgcctcccagatttaagcaattctcctgcctcagcctcccgaatagctgggattataggcacccgccaccacgtccggctaatttttctgtttttagtagagatggggtttcaccatattggccaggctggtctcaaactcctgaccttgtgatccgcccacctcggcctcccaaagtgctgggattacaggtgtgagccactgcacccggccagagatattcgtaaaaagaaaaaaaaaatctcaaattagtctagaaaaaatggtcttctgagacatgaagtgagtctggcttagtctgagctgcaacattagtgccacagcaactagcccaagctgttgttcagtgtgtctgtcacagccttctcttcagtccttatcaccttctcagcgggtacagagctgtggaaaatctgccagaaatcatctgctatcttcatctcatccagacacaatcactagtacttttagtagtggagataagatgtatctggcaggcttagcctcaaaatataaagttactagctgacaaaatctgacactgttaggtgagtcagtattcatctcctgtccttctgaagtaagccttttagctgttgagtcctcagttctcagcttcagcaaaaagaccaaaggatggaatgaaatgaagattagtctgccactgactatccccgcagagtcttaggcatgttattgaggaagactgtcttatcgtggtggttcttttccgtgtctgagggcttccattagtactgctgggatcactttatttacatgctcagcacccacctatatggaatcaactcttcatattctttcagagtgtgtgattttgggggcatgtttttgtaactcttgccaactggctccaagagttaatctccagcttttattgtccccttgtcacaacaatacatcctcctaactaatcatgactaagaaataatgtggttttacattctggaatcgattccccacccccacccccaccccgccccaccttgtttttggtctcttataactttccagaagtttgtcgatttttttctgcattaacataagttagtatttgttttgggctcctaataatggaggctatatggccagacttacaaagtgatcacagaaatacttgttgatcagcaatttggtaccaccatatagaattcatgaggtcagcttctttcaaagacatttgcctttcattattccatttgtttattgcagagaatagaagtattctgataaacgtagatattttcaggacctccacagagcattcagatgacatttttgttataatggaactttatcctaatgggcagcatcctaattgtagggtttaaatatatcactcttcctcctagcatttagaaaagggtttgatatgctttttctataaagggccagagagtaaatattttcagctttgtaggctgtatagtctctgtcacaactacttaactctgacaatgtaatgtgaaagcagctatagataatatgaaaacagatgggcacggctgtattccaataaaactttatttacaaaaacaagctcctttatttacaaaaacataggtcaagatttggctacaggccagaccttgggaattcctgcttataaattggcacctaagcagatataatggggttagcatgtttttctttttcttggagcctataacgtttggcttatgttaatgagtagtttgagagttttattgaagtaattggaatacttgaggcaagccaggatccactggtagtggaagagtaagagttgatggcaggataaaagtggtacaggccaggcatggtgtttcacacctgtaatctcagcactttgggaggccattctcgatggattgctagaagcaggagtttgaaaccaacctggacaacaaagtaagaacctgtatctacaaaaaaaaaatttttaattaactgggcatggtggcatacaccagtggtcccagctactcaggaggctgaggcaggaggattgctggagctcagaagtttgaggctgcagtgagccatgatcatgccactgcagttgagcctggacaacagagtgagaccctgtctcttaaaaaaaaaaaaagtgtatatatatatatatatatatatagtggtacagacaggtcagctcccagcctgcagtacggacaagtcagtgatcaaggttactagcagtgtaaggtctacacggacacagtaaccatttggctgagcatttccttgttctcattagtatttgatactgatatatcatttaaattttaaagcgcgaaatcaagagtttttagaactattgaaatgtcagcatttggctttagttttgttcccatttatttagcgtaaggctaaacttttagaataaactgctgagaagaaggaaaattttttagtagaaaactgaaaataaaaggaatcatgaattttagcaatgtatggtggcttacacctgtaatcccagcactttgggaggctaaggtgggactactgcttgagcctaggagttcaagaccagcctgggcaacatagggagacctcatcttagccacatgtggtggcgcatgcctgtaatcccaggtacttgtgagaaagaggtgagaggatcacttgagccaggagttcaaggctccagtgagccgtgatcacaccaccatacttcaccctgagtgacaaagtgagaccctgtatcaatttaaaaaaaaggggaatcgtgaatttcattggagcaataaaaagagctctctgcaatataaagttagcgacatcccattgatttatggccgtaatacctaagtacctaggcccaacaaggtaactccatcaaaacacctttctctttaatgaaaagtacggttattcctcagtcagacagtaacttcaacttcaaaccaaaactaaatgaaattcgaagcattttgtactaatggaagcttgatgcagatctaaacagtttcttattcatgacataggataaaatttcatttgtgagatcttttgattcattgttataagtcctgataaaatttaatacaggtatttctcttagttattttttggtattgcttgggttttttgttgttaaggggtggttgaagaagtgacatattcttgtatgagagcgtagtaactaatgttaaattgtaaagtgtaaggctaccctatataatgatttaaaaatataaatcatgtctgttttctaaattttaaagcaattagagaaactatatttttcttagttacaggagactttaagtaaagactgacaggcaaatagggtaatattttattcaaaattatcttggcatttttgtcatttatcaaaataaatttgaaatcattttaatcttccatttggacagtatttaattttagtaatggggtttgtaatacggtagaaattatgtgtctatgtttcaactgaatagaaagattttacttttaaccacttttttgctttctgcaagtaattttttcctaaatgggcaattttttaaatttttatttttattaagacgacattatagtgcttttttaagggttttggtaacattttaaaatataaaattgttcaaaatggcaacttttttaaaatttgaaagccatagaggttatatacatttatggaaatatgtaaaaggaactgtaacaaatgtaatactaccaagtttctagtaaaacctctcttcagataaatcaaaatcttggagtagacagtatgtaaagatcctttaagcaatctgtgtattaatagtgattaatttaaatcattagtattcagtgaatggtacaaattattagaatacgattcaaaatcaagaggaattcatactgttttccagtttgtccctcaattcacaagacctctcttattcatcaactaattagatttaacatttttccattgtgaatgctaaagccatcggccaaattaaatgaaaacaagtcccttgttgggtgcttccagaaaagtaaggccatacatagattgtgaagattgagtatgcaggatggtgtcatttaatggcatgggccttttattctgaaatggagctcttcataatcattgaaacgtggagggtagcaggccttggggtttgccttgccctgctactcccctaacagcagcagcctgtcagctgtatgctaacgaggtgaacaattaaaccgagtcctatctggctggccccacaggctctaggctcagacaaagaactgtttatacacctgttgtatgtgtagacagagccatttgaatgtggagctgcggattaaagggaagacatgggagcccaggagagcaagggttaaagagaactataagaactgtgaaagtcaaattctccagaaaatatatgagggccatttgcaaggagaatcaagttacaaagaaaaagttcctgctaacttcattgacatgaaaaactccagacttcaagccttcgtctagtctgaggccatttttttaaaggcttatatttttgctatgtgtgccagttaaattttttcttttgtaagctaattatgtttaagttcgtgtgagaaaatacttagtttgtattgttctatagtgtaaaaatatttcctggtgtttctgttgcaaaacaaatctagcacccattctgattttccttaagggaaaagtaaaatttctaagatttattatttaggtaatgatcagacactttttaatagttgagctttaaaaaaatcaaataattatttatactgatgaagtaaaaggaaatcagaattcagcagatgaatcatcacttagataagtgaaaattcaatttgttactgttcagtagtattgtcttacatagctataaaatgtttcacatgtataacatacactaagtatacatatgtttaaaatttaaattttagaaggctgttttttaaattacttggtgtgatagttcaaaatgttatgtaaaacagaattagtatatattgccaggggtcatagaagttttaagtccacattattataaatacaaatacacctcagcttttactttaacttacaattatttccccagcccgtcaaaattctcctagatttatttaatctttagagtaggcctaatcttccaaggttccaaagaatttgcagccgtatattatgtttgcccatatctatttttataaaatgggattttgaacttcctttcctcttagatcactgagtacttcatagtaagaaagcaccctcattcgttaagaataaacaagaccaggatacccttgaaacagaatttcatgaaacattttaaaaataatttgttctcttgaatacaattttcacagtccatttctttactgattgttaggttgagtacttcagattcttctcaagtttttttaggggaacaaccaaatactaaaactttctgaaagtgggaagtaggatggaagtctgccatagtttctgtggtcccttcccagctttaaggttttgtgattctaatacatcgtgaaattgtgtggtttagagaaagggtgtagtggaggcatgattattacccaagggagtagtgacacaaataatgctcagcaatgaccaatcctaaaatcattttaaaagtaactattaaattaaattttaaaatccactaaatggctatgtttcttaaaaataaagatgagaataagtgtaaaagacaaacatttcatggaaagtgtggtggaagaacgaatctattctaattagatctactaccaaatgacctgcattgcctaaaattttgctttggttccttttgtttagttcacagaaaaaccaaaggataaacttgcataggggtatttattcctcttagggtaaaatcatgcaaagtcatggaagataaaagctatattaattactcaagagggattcaaagcttggcagtttactaggattgaaggatttattgaaaaacagtggttctcatgtataactccagccaataaacctatttaattaaaagcttaatcttctagttgacacgtctgctactattctaataaaaacttcatccgtaacaagtttttttatgtatgttaatactgcaatagctgactgtttgatggtgtttgcattgcttggaatgtagcagtattttgttaaatgccagttcatgcatactttaatgtatttaggtattatatgaaatagattttcagattgattatataggattattaatagaccctataatatgtagtgcgttgtggcttatagaatgctttgtcagctcatttgcttctcacaaacaccctctgtgggatttaaaatttacaaattagaagtttcattttttaaaaaaggtatgttttggtttgatttaaaagcagtactgctatgaagtattaatattttgaaattctccccaaaaaccagaataatggcatccagaaaaagttgctgaaatcagatgagtgacactgttttctctattaaacctagtaaaataatttggacagttattgcctctgaactatcttaatctttttttatttttgggttttccttaactttaggttggaactcatcgggaagactctgtcagtctcaatggcaatcattcagtcctgtctagtacagtcactacttcaagcacagacctgaaccataaaacacaagaaaattatagaggtaactatattgttggttttcagaaataatgcagacagagatatcatttggaacactgtcacctttctcacagctggattgacatctgtgaatcaaaagtcattgaggtgagggaattccaaatagcgtggagagcagatatttagggttccaactggcccacctaggttgacaattacagatacttattgatgaatagagccacgtacagaccattgttcagtatttaccagttatcttttacctcttcctgttctgtcatgtccctcttcctcagacattttccctcatgagtgtatcttcatggtctttagaggcattgacagagatatttctgattatactgagagctccgaatgatggaagctgttgttttagagattatcatttgattgaagagacatgcaattttgataaaaagcaaacttgatcactgttccaatagagcttacaagtaagtgtgaagatagagcacttgaaagtgcaaataagatcaccaaaataaagttctcccagttacatttaaccatgatgcctgttttactgtttatccaggaagatgttaagcttatgtcctttacctctgcaacatcttagaagttagtttctaaaatacatagtttctcatccttgttcatttgttaaatagtgcctgaaagtgagcattaaattggtcatgggggtcagacttgttcttctaaatacaaatgctgttaaaaagcacaaggatgtggatatattcttttcagctctaaatagtatactttcctacatcttcaaacctccatcataaccctgtaactgctaaggatattcaccagctagaaagctttttattgtcttagctgtaattcatatatgagtctcgtcttttattttatctttcctttgcctctttgttaggtggcttgcaaagtcagtctggaactgttgttacaacagaaatcaagactgaaaacaaagaaaaggatgaaaaccttcatgaacctccttcatcagatgacatgaagtcagatgatgaatcctcccaaaaagatatcaaggtttcatctagaggcagaacaaggtatttgttagcatccaggttttaaattttattcattttccataggtaaacatacttgagaagctgggtgtcatgcatttattaactgtcagctatgttctagatattgtgttaggatttttgtgtatgttgtctcatttaatcaccacatcatctctataaaagagaagtatatgaaggtttgatttcaaaattatgttttccttcatactataccatttgagggactatatataaaatataattatatctcttcactcaagttgcttagtctgttagataagtagaaggtaaaatagctaaaagaagttaaatcatgtggtacggacatttagatagatttgatcaataaatatttgaatatggtcaggtgtcacttaacaatggtatatattctaagaaatgcattgctaggcaatttcatcattgtgcaaacatacagtatactttcacaaacctagcctgttgttcctaggctgtatacctgtataccatgttactgaactgagtgctgtaggcaattgtaacacaatggtaagaatttgtgtatctaaacacctaaaaggcacagtaaaaataaaagataaaaaatggtacccgtataggccacttatcatgaatagagcttgcaggactcgaaattgctctgggtgattcaatgagcaggtggtgagtgaatgtgaaggcctaggacatttctgtacactattgtagactttacagacactgtacatttaggctatatttcatttattaaaaaatatttttcttcaatagtaaattaacctgagcttactgtatgtcatttactttataaacttaaattatttttaactttctgactcttgtaataatagcttaaaacacaaacacattatatagctatacaaaaatatattttctttaagttcttttgtaagcttttttttttttttttttttttttttttgaggtggagtcttactctctcgcccaggctggaatgcagtggcatcatctcggctcactgcaacctccgcctcccaggttcaagtgattctcctgcctcagcctcccaagtagctgggattacaggcaccccccaccactccaggctaatttttgtagttttagtggagacggggtttcaccatgttggccaggcaggtctggaactcctgacctcaagtgatctgcccacctcatcctcccaaaatgctgggattacaggcatgagccaccgcacccggcctttgtaagctttttcctatttttaaaattttgtggttttttgtttgtttgtttacttttcaaacttttttgttaaaaactaagacacaaacacacatgttagcctaggcctacacaaggtcaagatcattaatatcactgtcttccacctccacatcttgtcccactgaatgtcttcacaggcagtaacatgcaggaagctgtctctcctaaggtaacaaagccttcttctggaatacctcctaaaggacctgccttgaggtcttgtcgcccaggctggggtgcagtggcacaatcttggctcattgcaacctctgcctcccgggttcaagcagttctcttgcctcagcctccagagtagctgggactacaggtgcctgccaccatgcccggcgaatttttgtattgttagtagagatgggatttcgccatgttggccaggctggtctcgaactcctgacctccagtgatctgcccacctcggccttccaaagtgctgggattacaagcgtgagccaccacacccggccaacttttttttttaagttagaagtatactctaatgataaatagtatagtatagtatagtatagtatagtatagtatagtatagtatagtatagtatagtataaatacataaaccaataacataattagttattattattatcaagtacagcaggtcctcaaagaacatcattttgtgaaatgatgagaaaaaaaattgattcctagctagagcctctttgtttgtggagtttgcacattcttcccatgtctcctcatgtgggttttctctaagtactccggtttcttccttcaccccaaaaatgtgcgtattaggttgagtaatgtgtctgaattgtcccagtatgagagagtgtgggtgtatgtgtgagtgtgccctgcaatgaaatggcatcccgtccaggattgtttctaccttgctccctgagctgctgggataggctgcagcctcccccgaccctgaactggaataattgggtaaataataatcttacttatttttatgagtctttcttaaatgtatgcatagttcacatttatttcattgtttaatattagaagtgtattttggtttttatttagaagtttgatgatattttgtcaccagaaatgtactgtagggacttaactcttatttatatcaattaacctatgataaaactggttttattatgtgtcattttccttaaagttgcagtttccaagaactgatcaatgacattgaggacttactgtagtgtgtactgtacttaattgcatgcttttatacaactggcagcacagtaggtttgtttataacaaacaaagagttaacgtgactaatgtgttgtgctgcagccttaccacagctacattactatataatagacattttttagctccagtataataagaccactgtcatgtatgtagtccctcattgactgaaatgttatgggctcataactgtatattaatataagggctaaatatatggtaagactctgatttaaacaagcaaattatggcccatgggcctacccagctcactgcctatttttgtttttgtttttattatttatttatttatttatttatttatttatttatttatttaaagacagggtctcgctgtcacccaggctggaatgccatggggtgatcttggctcactgcagcctcagcctcccaagtagctgggattacaggcagatgccaccatgcctggctaatttttgtatttttaatagagacaaggtttcaccatgttttccaggctggttttaaactcctggcctcaagtgatctgctcacctcatcctcccaaagtgctgggattacaggcgtgagccactgcgcctggctgctgcctatttttatgttttattagaacatcaccatgccacattcatttatccattgtctgtggttgttttcatactgcattgccagactagaatagttgccacagagactatatggcccatcagagctgaaaatatttaccatctggtccttcagaaaaaatgtttctttttaacaaacaattaaatagtaatttgagaaaagtatgaaaaaggaaatattctaggcagaatgatgttgtcgtggagttttctagaaaatggacttgactttgctttgaagtatgaatatagacacatagtacattagtttcaagtgatttctggatttttccttcaaatttttcttccagttctacattaaaattagatgagttaggccaggcacagtggctcatgcctgtaatcccagcactttgggtggctaaggcaggaggatctcttgaggccagaagttcaagaccagcctgggctacatagctagattctgtctctacaaaaaattagcggggcatggtggcaaacacccgtagtcccagctacttgggagggtaaggcaggaagattgcttgagttcagaagtttgaggctatagtgagccatgatcatgccactgcattctagcctggctaacagagagatgctgtctctaaaaaaagacttttttctaatgaaaatttaaaagttagatcatttagtatatttgtggtacaccctatttcttggcatacatattcatttattaatgatatgtgtatatatcttatacagatttaaaacattgttctttgtgttgaattatggtgcaatgaggatggtagataaaactaaaagaagcagaatgttcctttctgtcattcacaacttaaaaggtgtccttttgctcttttgacattctcactgttttcaacacctaaacatttatcttgggaaaaaggaaatcttaagatcttaatattattactttaatatgtattgtactcaactatcaggggcataaggaaggaaaaaactgtgtcaaggaattcagagaccactctttggaggcatcttaactcttacatagtttttattcaaatagaattttaagggaaacaatttacatctttcctccatattcatcttcttatagatcaggaatcagcaaactttctctgtaaagtcccaaatagtgactattattaggctttactggacatacagtctctgtcacagctacttaccactgccattagaggacaaaagtagccaaagtcaaatgggtatcgctgttccaataaaattttacttacaaaaaaggatgaccagctcatagatcagtttgctgacccatattataggtcatcagaaattaggaggcagtgtaataggttagtaatagtccataataatgaataggttaataacatgacctttggacaaaataagggtttgaattgtggttccattacatacttgccgagtgactttgggcaagtctttgagctcagtttcttcttctctaaaaggagactttctgttacaggattcttgtaggaataacctgaaaatgatgcatgtaaaaccctttgcacacggtctagcacacagtaagcactcaataaagatactatatctactgttacagtggtagtgttatggtggtaattttaagtgtatggtgtaggcttgcttccatggagcactgagctgacatctcatcatcatactgccaccagttagctctgtgatcctaggtcttgaagtggttctcaaccctgctgcccagaccctggaacattttagaaatacaggtgcctgggccccaacccaaactcactaaattagtgagtctagcatctctggtagtgagacctggaaagctgtatttttcaagtgctcttggagattctaatgagtggctatctgtggacaccactgggctcgatgatctttaaaggactttttgaagtcaaagaaccagtgattttcttttgtcaaaagaatgcatttatatgattcttaatgattagcaggttaaatattgcatactttttagggacagagtctctgtttgtcacccaggctggagtgcagtggacaataacctcaagctgctggactcaggcaattctcccatgcccgcctcagcttcccaaaccacttaggttacaagcacgagccaccatgcctggcctgtgtacttgttcttttattagaatactcagggtattaaagaagaggtaaaaatgtctaatatttttgtacattatttcaaggttctgagaagctgtggtcagtaatttatatctgaatcataaatagaactttctataagctgttacagagcatctccctcatatgtttttttttctgattatgtagtctattttcattacagaaatgtagaaaatacagaaaagtatgcacaaaaatcacaagaaacaccactattcagaattaaccactgtttacttctttttttttttcctgagaagttctaatttgatttcactgtggtctgagagacgttttgttgtgatttctgttattttacatttgctgaggagtgttttgcttccaattatgtggtcaattttagaataataagtgcagtgtggtgctgagaagagtgtatattctgttgatttggggtggagagttctgtagatgactgttaagtccgcttggtccagagctgagttcaagtcctggatatccttgttaattttctgtctcgttgatctgtctaatattgacagtggggtgttaaagtctcccattattattgtatgggagtctaagtctttttgtaggtctgtaagaacttgctttatgaatctgggtgctcgtgtattgggtgtgtatatatttgggatagttaggtcttcttgttgcattgatccctttaccattatgtaatggccttctttgtctcttttgatctttgttggttgaaagtctgttttatcagagaccaggattgcaaccgcacaacccctgctttttttttttttttttttttttttggctttccatttgtttggtagatcttcctccatccctttattttgagcctatgtgtatctttgcgcatgaagtgggtctcctgaatacagcacactgatgggtcttcactctttatccaatttgtcagtctctgtcttttaattggggcacttagctcatttacatttaaggttaatattgttatgtgtgaaattgatcctgtcattatgatgctactggttatttcacccattaattgatgcagtttcttcatagcatcgatggtctttacaatttggcatgtttttgcagtggctggtaccggttgttgcttaccatgtttagcgcttccttcatgagctcttgtaaggcaggcctagtggtgacgaaatctctcagcatttgcttgtctgtaaaggattttatttctccttcatttatgaaacttagtttgtctggatatgaaattctgggttgaaaattcttttctttaagaatgttgaaatattggccccgactctcttctggcttgtagggtttctgcagagagatccactgttagtctgatgggctcccctttgtgggtaatccaacctttatttctggcagcccttaacattttttccttcatttcaaccttggtgaatctgacagttatgtgtcttggagttgctcatcttgaggagtatctttgtggtgttctctgtatttcctgaatttgaatgttgacctgccttgctaggttggggaagttctcctggataatatcctgaagagtgttttctaacttggttccattctccccatcactttcaggtacaccaatcaaatgtagatttggtcttttaatgtagtcccatatttcttggaggctttgttcatttgttttcactcttttttctctaagcttgtcttctcgcattatttcattaatttgatcttcaatcactgatatcctttcctctgcttgatcgcatcagctattgaagcttgtgtatgcttcacgaagttgtcgtattgtggttttcagctccatcaggtcatttaaggtcttctctatgctggatattctatttagccattcgtctaacctttttccaaggttttttacttcctcgcagtgggttagaacatgcttctttagcttggagaacagctttcttattaccgacctcctgaagcctacttctgtcaactcatcaaactcattctccatccagttttgttcccttgttgatgaggagttgtgttcctttggaggagaagaggcgttctggcttttggaattttcagcctttctgctctggtttctccccagctttgtggttttatctacctttggtctttgatgttggtgacctacgaatgggattttggtgtggatgtcctttttgttgatgttgatgctattcctttctgtctgttagttttccttctaacagaccggcccctcagctgcacatctgttggagtttgctggaggtccactccagaccctctttgcctgggtatcaccagcggaggctgcagaacagcaaatattgctgcctgatccttcctctggaagcttcgtcccagaggggcacccacctgtatgaggtgtctgttggcctctactgggaggtgtctcccagtcaggctacacgggggtcagggacccacttgaggaggcagtctctccattatcagagctcgaatgccatgctgggagaaccactgttctcttcagggctgtcaggcagggatatttaagtctggagaaactgtctgctgccttttgttcacatacgccctgccctcagaggtggaatctagagaggcagtaggccttgctaggctgcggtgggctccgcccagtttgagcttccctgccacttcgttcacacagtgaacataaaaccacctactcaagcctcagtaatggtggatgcccctccccctgccaaagttaggcatcccaggtcgatctcagactgctgcgctagcagcaagcaaggctccgtgggcctgggacccaccaggccaggcacgggagggaatctcctggtctgctggttgcgaagactgtgggaaaagcgcagtatttgggcaggagtatactgctcctccaggtacagtcactcatggcttcccttggctaggaaagggtaatcccccaaccccttgcacttcccacgtgaggcaatgccccaccctgattcagctcaccctccgtgggctgcacccactgttcaaccagtcccaattagatgaaccaggtacctcagttggaaatgcagaaatcacccatcttcttcttcgatctcactgggagctgtagaccagagctgttcctatttggccatcttggaagcaacccacctcggcaatgtattttttttaagtattttgtttttgttttggatcagctttattgaggcttaatacacatgtaataataaaattcactaattttaaatatacagtctttattatgtatgttaaaatgtatatattttgtcattttgacaagtgtaaaagttatttaacagccaccttattcataatgtagaatccacctcaaaaaatgtccttattccccttggtagtgagtccctttcctccatcccgtggtccttggcaaccattgatctgctttctgctaccatagttttgtgttttctagaagttcatgtaaatggaattgtagagtatgtatgtgatctttcatgactggctttttttacttagcataatctgcaacttgattttagatacaacataatgggccattgtctgaatgtactatgatttattgaacccatttgctattattaaatcccaatatgttgctaatgtaaataattctgtgatcatctccctttacataaatttctatgtacatctctaattatatccttaggatgaatttccaaagttggaattgctgatcaagaggtaataaacattaaggctctggattcgttttgccaatttgcccttcaaaaaattgtgtcatttctcccatgttttataattatcaccactgatgataatttatctctagaacaaaaaaatagccgttttctgggatacttctctcaatctatatcttaagctttccttctttcttttcgccaggtaaccgccagagtatatttaagagcataggctaagcaaattatacattcatgtactaggggggcttttaaactgtaatgtgtatatcagtcatctgggaaacatgttaaaatgcagcttctaattcagtaagatgggagcagaacctgagagattctactccagtgtttttaacaagctcccagtaatgctgatgctgctgatttgtggatcacattttgtgtagcaaggtgctaaaatattatgtagttgttgatcttatatttatgaagagtttctggagaaatctttatgctataatgtgcaatgaaaaatgcacttaagagtgtatgtagtatatttcaactgtatgactgtatatgtgcattgaagaaaaatttgaaaggaatatacagtcatgttaactgcacctattacaactgtttacaagatttataggtggttttcatttccatctttacgctttataattgtgcacaatcagcatatcttactttataggaaacctaatagaccttgttgttactttattttctagcagtactaatgaagatgaggatttgaaccctgaacagaagatagaaagggagaaggagaggcggatggctaacaatgccagagaacgcttacgcgtgcgggatattaatgaagcattcaaagagcttggccgaatgtgtcagcttcacttgaagagtgaaaaaccccaaacaaaactccttattcttcatcaagccgtggcagtcatccttagtctagaacagcaagtcagaggtaagtaggttcagccgagatgtataactgttctgcttcagatgggcagacatttctgtttacagttgctcttctgcttggagaagttgtttgttatttctcccagtacttcttctactgtatcatcagggtcgtttttcctgtaattctcacttctgtctcactgtatcacccaatatctgtgggctgagtgttctccaccaatagagagtaattctgtgaagcaaagcagataacaaacagcctctgcctgctgctcagcaatagtgctttgtgtctctttgctctggttgcttctgatctctcaaccattaaatttacctgcctggacctgccctcctccctgctctttatgtctttcctacttctctgtattcattttcttgcctgctctactttggagtatctaccgtgccctgctggttaataggatgccttgttatcatcccttctgcctttgccagatacctttacacccatgtcaataaggtctcagggcttctttgttgaccccagaccaggaacaccaagaactttttgggctaacatacatcggcatgcctctgtgtccttaagggcaaaagagctcacccagtgctgactcagtttcatttttcaggaagtttgttgcagttttgaagaaactttgaaacttcatttgttcaacatgtatttattgcatacctcctctgttccaaccagctgtgtcctaggccctgggttatcaaataatagaagcttcttatctttaagaggttttaccatcaagcttgagtttctccatatacttatatattgtcttaaaatatcctaagcctttttgcaaggaattcatagatgtggccctaggttccagatctgaccactagtctctctcagagcaattctttcgattttgtgtgaagacggttcaaaaaagaatagggtgggcagatgcttgaaaactacagccatggagcctcagcatagattacagaatgagtactctttcttaggaaaaccagagttagagaacttgaacaaactttcagaaatatatacagtagtagttaattcatccacttccctccaatatatttaatgaataagaatgagggatagatcattttgtgtataatcaacctaatgttaaaaatggatacttgctcctcttctcccaaggtccttgaaatatctgtggagtataaatgttaatgaaacctaatcttcaagtaattatagactcccttgtgatatccataaggaggcagattgttacccactcgcctgtggcagaagcagtggttccttgaactactgatacctcctgtcactttaccaatggttttttttcttgaattgtgtctgacaccctttgtctcgctctgaaggcagcaaggcacctatgttcagtggttcaagtacactcatcctcctcttcttcagcccaggatatcttctatcctgacttcacccagccatttattgttaaagccactgcctccatctcagctgtaaaagtcttactgtctggtcaacaggagtaccagaatttattctagtacacagcaccttttcctcccatagtgcattagaatcagaatgcagtcatttgtgtttttaaaaactttttttttaagcacagagatacctacttcagatctaagccattaaaatgagaaatacttctgtgatggaaaaacacaaacataaataaataaaacataaattctaccatgcctagatggaccttattcatttgtaacattggaatttccagtggttccatgcgggcacctagaacagaaaatatgagtctgagagaagatctgtcatctaggctttcttactactgactttctggtctgttatgggtactgactgtttcatacagttctgtaaagctctgtctaaggactctttgactgatgagagtttgaacagatttcaaatacactgaactgtaacttcgttagggattgctttgatattcagaaaagcctacttctccccggccttcagactgggcttgaagccttatcttaggactttacataaaagcccagggatctttgtaaggtagggtgtgtgtgtgtgtgtgtgtgtgtgtgtgtgtgtgtgtgtacgtatgtagagatggtctcactgtgttgcccaggctggtcttgaaatcctggcctcaagcgtctataggcctgagccaccatgcctgggctcagactccttgaaggacactcttatggctgtcagatagggtttagaacccttcatacaggccacaatacctgtgccttgtctttggcaacaccttcagagttttgtatagccactgtcttttcctcgatttacctacagttttgagttattttggtgacttgatcacttttgagagcctcttcatcctgtacagagaccctccttagcagtccctgatccaacactttctataaaaacagcttttgtttacatgacctatttgggcatcctctgcactctggctccccttctgatttgggatgatgctgcaagactgtatctgattgtgacccaacctgtcacaatcactggatgcttatttttaccaggaggcaagcagacccaggtctagcagttcatcccagagaagagtggcttctcttctaagcctcagattttgccagagcattttttgtgccttgttgccccacctgtcaaaccctaagtccccactgccagtttaagcttttccattatcatgactacaacgttatttgtacctttgccatttttattccccagcagataaaacaaatgaccttcaagtttgtactctcagcgttactcaagactcagtggttaaacatttcctcctctcaagctctttcacaggtcagcttagtcaggtcactgttcttttgataatttagtgatgagagaactattagattttcagtttcctgttctacaagtgagtttgaacataaatggtgttggacagtggttttgaaatctggctggtcccagaatcacctgaagcttttctttcctcaaacatttccaaaccttaccccaggagattctggtgcaatgagatggttaaatgtggtagacttagcatatgcagtgataatactgcaatctttcctacatccccactaaaataaataaaaatgatattcattttaacccacaaggacagatgagagaggagaccatagcagatgaaatagcgaaagctgcatgtaggatagaaagtcgatggaatagtggtacttatttgtttctaagtactgaagaatacatgtttcaagagtggtaagatctaatcttgtgctgaatacagtgatttcttaaatgccccgaagttaaaatacataatcatgaaatttcagagcattcgggtaaaaaaaatattctaaagcttctggagataaaatataaatagcttatagataaagaaacaagaatcaaaatatcatcagcgttctggacagtagtactggattccaggagatagtggagcagcaccttcaaatttctgaggaaaataatttcaacctagaattcttttttttttcttttttttttccttttttttttttttgaggccgagtctcgccctgtcacccaggctggagtgtagtggtgtgagcttggctcactgcaacctctgcctcctgagttcaagcgattctcctgcctctgcctcctccatagctgggattacaggcacgcatcaccatgcccagttaattttttgtatttttagtagagacagagtttcaccatgttgaacagactggtctgaaactcctgacctcaggtgatccgcctacctcagcctctcaaagtgctgagatcacagacgtgagccaccgcacctggccagtttcaacctagaattctataccttgccagacaattaatcaaaagatggatatagaatgaagatattccacataagctgggcatggtgtgtgcctatagtcccagctacttgggatgttgagtcaagagaatcacttaatcccaggaatttgaggctgaagcgagctgtgatcatgctactacactccagcctgggtgacagtgccaagtccaccctgtctctaaataaaaattaagttggcagccgggtgcagtggctcacacctgtaatcccagcactttgggaggctgaagcaggcagatcatgaggtcaagagatcgagaccatccttggcaacatggtgaaaccccatctctactaaaaatacaaaaattagctgggtggggtggcgtgcgcaagtagtcccagctacttgggaggctgaggcaggagaatcgcttgaacccaggaggcagaggttgcaatgagccgagattgtgccactgcactccagcctggcgacagagtgagactccatctcaaaaaaaaaaaaaaaaaaaattaagttggctgggcacagtggcttatgcctgtaatcccagcacagtgggaggccaaggcaggaggatcccttgagcccaggagatgacttgagaccagcctgagcaacagttaggccgcatctctaaaaaaaatttaaaaattagctggatgtgttggctcatacctgaagtaccagctacttgggaggctgaggtgggaggatcacttgagccctagaagattgaggctgcagtgagctatggttgtagcaccacactccagtctgggcagcagagtgagaacctgtctcaaagaaaaaaaaaaagatatatcagatatgcaaatcctttaaaaatttaccttccatatacatccttttaaaaaatagagacagggtttcactgtattgcccagggtggtctcaaactcctagcacaaacgatcctcccacctcagcctcccaggtagctggaactgcaggcattagccaccacacctggctcgtgtatattttttcagaaagcatctggaacatatgctttaaccaaataagtgcataatcaacaaagacaaatgttatagaatccaggaaacaaaggatttaacatagaaaaacagcaaaaataaatcccatgacaagagctactgggcctagagagcaactagtccattgaaaattgaatactattagctgcagaagaaaggtttccaaggaaagaaaatggaattaattgatgatgtgttcaagattttaggaaaatatattgataggcatttgttagatctcttggagcattcagtggtggggttagggagacggaatttgcattactaacaaatgaaaaaacaagtagctattaactataggaaaaataaacagttatatgagcaagggagcaatcactgtaaaaaaaaaaattttttttcttttccaagttgaggtcagatgggtaatgtgctgaggtcataacaaggttggagggtggcacatctcacacacactcgtgaacacccaatcatcatgctcatgaactacaaaaggatcaaacctttcctccctctccctctctctccctccctccctccctctccctccctcccctctctctccctccctccctctctctccctctctctccctacctctctctccctccctctctctctccgtccctgtctctccttttctttttctttctttctctttctctctttcctccttttttctttgtttttctttctttctttttgtcttattctttatttctgtctttgtttcttttttgttctttcctcctgtcttccttccttcctttttttttttctcctttcctttcttttcttgtcttgtattttcttttctttcctttccttttctttcttcctcagggttttgctctgttgcctaggttggagtgcagtggcacaatcatggctcactgcagtctcagcctcccaggctcaagtgatcctcctacctcagccccctcagtagctgggactacaggtgggtaccagcacacctggctaatttttaaatttttgtagagacagggtctcactttgttgcccaggctactgtaaaattcttaacctcagcagctatctccatatagtcataataacataaatattttcctagtcataataatgtaagaagtgactagtgagttagccaaaaattttgctataaacatgttgcaaagttgatgttataagagagtcaagtcctcaactacataagaagtcaatagatagaattcccctaattgaaatatgggaagacatacttctcatgccctgcaggtaatgagaagtaccagatctttctggctacttagcacacatttgccgtggtctgtgtcacacaccaagaggtatgaaagagtagccttagtcttttttgaatcaaagttgtgtatttatttcacatttcctagagtctgccatagtattgttcttcctgccagaagtgttctttgtctgaatataggaacctgaaagatcttgcctaatttactgagtttttggtgctgatccttccaagcatttctcatcatgtctcctagatcctggtgtgatagagtcatagttggctaagagcaattttccattataaagagaaatgtgagccttttttcagttggaaaattttcacatctcacattctcctctttaagttttacatgctaatccatgccatcttctcagtctctcgggtcattatatgagactttaacctccacagtctcactttttttttttttttttttggagacagagttttgctcttcttgtcgcccaggctggagtgcaatggcgcgatttcggctcactgcagactccgtctccccagttcaagtgattctcctgtctcagcctcccgagtagctgagattataggcacccgccaccacgcctggctcactttttgtatttttagtagagatcgggtttcaccatgcaggctagtctcaaactcttgacctcaggtgatccgcctgtttcggcctcccaaagtgctgggattataggcatgagccaccacgcccagcccacagtctcttataaaaaacaaactgatgaaggacgaactcttatttgttagaggtgcacaactacttattaagaaagcagctcttaatattttttgcataatgatgaacatactattttttcctgctagttaccctaataaattaactaagagtgtatctttcttccttcattcatcctccttatagttgtataggctctatgtctttctaaatacaggggcttagaaaattagaactctaaaatgaaattttattagtatgcatcactgatagtcaggagtcagctaagtttaccataatgaagatttttgtttactttttaaaaacttggatgtgaactgtaaatgtgtattgaaatttatacatccagatacacttttacctactttaaaggggaatccggcacagtggcacttgctggtagtcccagctttttgacaggctgaggtgggaggatcctttcagcccaggagttcaaggcaagtctgggcaacgtagtgagaccccatctctgaaaaaatggttgggggtggggtggggacatggaaaaaggggagctgtactaatggtatatcggctatgccctcatttcaagaaaatctgacataaaatattacaacttctaaaaaatactattttcattctagactaattacaaatgatccctttatattatattcattagggcatttttaatccatttataaaaatatgtggaacaactgttaacctatactatatgttataatcaaatgaaaagctatatcagaagctatggatatcttgggcttaaaactcattttttaaaaaatccaacaggaatagtaagtagtgtgtaagtagattttgatccagtgggtttttgatctgatggatattctttccctttatttctcacagtagcaccctattctttttttttttttttttttgagacagggtcttgctctgtcatccaggctagagtgcagtggcacaatcactgcagccttgacaactcttgggctcaagcgatccttgtacctctcagcttattctttaacctcttttgaaaatgcccgtgtcacagatcccacgcagtcttgtttgctatcttttataagaagcagcagaggtttttaccacccttttaataacacctccagcaatagaaagaccaactcattcatcttgtttcacatacatatcaaagtagaaaagtaagatgtgctccacctatctatccttctccctcgaattggcacatttcctatagaagaggggtccccaacccctgggccacggaccagtaccagtggcctgttacgaacgaacgggctggctgcaccgcaggaggtgagcagagagcaatccagcaaagcttcatctgtatttaccgacactccccatcatttgcatctccacatcctgtcagatcagcggcagcattagattctcataggagcacgaaccctattgtgaactacatatgcaagggatctgggatctaggttgcctgctccttatgagaatctaatgcctgatgtgtcattctgtcccatcacccccagatgggaccatctagtttcatgaaaacaggctcagggctcccactgacttaatggtgagttgtataattatttcattttatagtacaatgtaataataatagaaatacagtgcacaataaatgtaatgtgctgaaatcatcctgaaaccatccctgcccccttccccccagcccccgcacccagttcatggaaaaattgtcttccacgaaaccagtccctggtgccaaaaaggttggggaccactgctttagaggaatagctgaggatatctcttactttatccttttctgaactggtaacattttagataaagcacaggtgtctctctctaagtacaagatgtcagcattcatgtcaattcagtgtaccgtgtcttagtaggacattgaagagacttggtagcctaataacaacagcatttgccaaaatgtttgagtgaagagtagcattttgatttaaatcaaatcaaaccctagaaaactaaatcataagcaaaaaatgaagaaaacacaagatggtcacttagaagtataaatctggaggctcagttcaatgctgaggttttatgtgagcacattgtttcttctatgtgatggtacttagtatgggaatgaagttacacaaaacaacagcaatttgttcagcttgagacctaattcataacttaaaaccatagtgataaaaattctttccccctgttttagagaggaaccttaaccccaaagcagcctgccttaagagaagggaagaagaaaaagtttctgccgtatcggcagagccgccaaccacactgccaggaacccatcctgggcttagtgaaactaccaaccctatgggtcatatgtaaacatcagccaggtaagtacgggtttgaaaagaaacagcaaggaaataaccttaagattcatcttaaactgggttagaatctttgaacagaattctctagtgagcagtggccattgtaaaggtcacatgtaatttgaaatataacagtttgtctttctgttacattatcagacttagagagccagtgtcattttatagcaaattgccattttcttcaaagtgtggcagtatcttgtgactttggttcttctgttcggagtcatcatgtgtactctcttacatgagtatcttcctgatccaagaagaaatagtacaatgactcaaccgtcagaaaacgctcttgttaccactcatgttcttcatttctttattcagaaatgctgactatatcatcaaccagttttctgccaattatctagctttttgtcatgaagcctttatacatgaaaaagttatcacttgtatttggatcaataatgcaagtttatgatatgatgcttcttccccacttgcaagcacatcagttaacaccctctagaatctattaatgaatgggaagttattatatatgttagagccagaatgcccttctctctggtggaattttacttgttcaaagactgttctttatatcttccttttcatggactaaacataattcagttccttgtgattttttttttttttcctcaagacagagtctcgctctgttgcccaggctggagtgcagtggcacgatctcagctaactgcagtctctgcttcccaggttccagcaattctcctgcctcagcctcccgagtagactagctgggattacaggtgtgcaccaccatgcccggctaatttttgtatttttagtagagatgggatttcacgatgttggccaggctggtctcgaactcctaacctcaggtgatccacccgcctcagcctcccaaagtgctaggattacaggcatgagccacctcgcccagctggtaacttcatttttataatctgctttcagcagtatgtagtttttttcccaattttatcaacagattaaaggtagtaagtaaaggcagatgagtgcggggtgtggaacagaaaaaaatatcaagtgcagtttcatttggtcagttttgtggctgtctcattttgaactgaaagtctggaatttgatagattgtttgatagataaactacaaatattagtaactcaccttttcctgagggttttagttcctaccgccactacatatatagggtcaaatgagactacatatagggtcaaatgagactacatatagggtcaaaccagaccacaaagaagatttcatttagggtaaaagaaaagaagagttaaggcagttatttcgtaagtcagttataactgtaacattagcacactggagaaaacctcaaactacctcccccacaaaaagtatccagcaatctaacagattgtacatgtcagggactttaggcaagagctagtttacagatcctctaaaacctagatcattgtttcatactctgtagaaaatatagactactatgaaacagtaagtatttttgcttcaaaaataaactttgaagtttttttgtttgttctgggatttttttgttgttgttgttgtttgtttgtttgttttgagatggagtttgactctgtcgcctgagctggagtgcaatggtgtgatcatctcagctcactccaactcccgcctcctgggtttgagcaattcttccacctcagcctcctgagtagctgggattacagacatacaccaccacgcccagctaatttttttgtatttttagtagagacagcgtttcgccaggctgcccagcctggtctcaaactcctgacctcaagcgatccgaccacctcggcttccccaagtgctggcgttacaggcgtgagccgctgagcccggccaaaaaattaactttgaagttttaaaataaaaccatgccactatttctcagtgcaaaagagactttctaaactgatagattatttcaaagaagagtgatgggagaggtaacttatgctcaggtcccagataaccaccaagctgtgaaaaagagcactaggcattctgccctaacacttctcttggagcctgtgtcttatttttcttgtctcgctctagttagttctacccatttcctcttgttttcttctcagtctctcttactcgttcaactttgtcttcttattctcatctcgtttccttctgtttacttcctgtgcttttactacttctctatttcatactgctctcatagctctacctttatctctttataatgtggaaattttcccacttaggttaaaattaaactttgggcattcccacctatcaaaaaaggatcaagaattcttttaagtttaaaaaggcatcaagatatgagacatgtagtgaatgcactttgttccatagattgtataggctagtgtttgtcatcttagaatatgtgttaaggttgctaatttcataaagatagttatctggtttcataaattggatagcagattaaaagtagcaagagacagggcagcaggaacaatgctactagaatcaaaatggctaagacatgaccacagaatgactggttataaacgtacaaaaatttgccatcctgtaatgtaggccaagtagctttgaatatcttagttttccgtccctaagagcattgctgtgtacctaaacaatactgtggttattgtttaataaggaagtaaaagttatgattctatctaaaactattttattaaaaatttaaagtagaaaatttcagagttactgctatatatattatattgggaacataagtatgtatagaatttgtactaatagagtaaaatattcttaataaatagcaaacatttgttgaggacctactgtggaccaggaactgggaccaatatgaaaatgaatgcaaggtagcctctgacctcaggtgctctcagtttagatgaaataaatgtaaactattaacactgtggttgagtggaggcagcagcaaattgagggctttaccattgtctcactactgaggaatgaatgagtagcacctcagagctcagttattgccaacttgagtgttattaaaatgaaggtttgcatcattgcggcagctgttttatacgcctatagtttgtgattctgtaatcgcatgatctcctttaaaaatcttaccatatagccgggtgtggtggtgcacacctgtagtcccagctactcaaagactgaggtgggaggattgcttgagcccaggagttgaaggctgcgttgagccatgatcatgccactgcgctccagcgagggtgatagagcaagacactgtctgaaaagaaacaaacaaaaaaccttaccatacacatcaagtaaaaccatttcagtataccttaaaaggaaaaagttcattaagtcacttagcagactacaaatttagtgcagacctggatatagatgaggaataccagcatttttttgttggtgggagggggaaggtgttttatttttaacaattatgtactaactggtattgtcctctcccttggctgtccctgccacagttccagagttatcagtaggctagatagaaggtgacctctcctcataaggacttggacaactcagattatctgaagacacaaacctgacaggagggagaagaaaaaacaaaacacttgaaccaagaaactcaaatgtaatcctacgatcaaagcaactggtcaacacttccatcagaagtgaagataggaagctcatcagatagaacatcagcccatgagatgtttgcaacaaatcttttgttgcaagcagtgtgtcgcttctgcacaatcagagactgtctcgatctctccactcaccgtggaagttgccttgtgcctaaactgaattgacaaatgcattgtaactacaaattttatttattgttatgaaactgtaaggtctacatataaagggaaaaagttaatgtggaaagctgatctacactcagctgatgccagcatacattaaagcggttcacgtgcagagaacaaagcagtgacaaccattggcccttagcattcccggcatacctattagtgtcttaaaaaggaagggaaaagtcttttgttgccctctcctatcctcttgccatatgaatagcgttttccatgaaataggaaaatattacttggtatagcatttctcttgctctcattttttgatttatttttattttctctttgtgggtgttatatttgatctctaaatctgaacagtttatggtcacagtccagcctcctccgtgcagccctgtgtgctttgcacatttaccttacagtggtaagcagagaccatctgtgaccatagcctagctagcattttaaaaggggaaattttgttctctaggttttcccccaaataaacattgctttatttctaataataaccaagacttttcaagcttctagatctcataggaaagcttgtaatagcaaaattgtaaattacaagggaagaatctactttttagaaatcgctttgttttccaagcagtaagtactacatacagtacttgtaaagtgttagctgtaagtaagcacaaaatacatttaaaatacaaagacgattttttcaggctgtgattatggtgaacataacaaaacccagtagtcaccaaggcaggtagtgtgataaatgaacacaccactctgaggctaattacctaatggaatacaagagcaatggtcacccgtatttccttatcctagcctttatttctctgtcatttggatggctggtcaatggggaagaattgagtgggtgatttaatcaactgcaaaccatctgcccctgtcccaaaatgatgagccagattagcattaaaccagtacttgtcagtccatcttaatactgttcattaaggcactctctgtctctaatccttaggagttgttttaaaagacataatcactttgaacttccatgaaacctgtcttccaccacaacaaccctgggagagaaaaacatgctaaaggaggtatcttggcttaataattccttatagccaatatcaacagtggcaatcagcacacagaggaaaggacccaaatcactatgtagcttaaagatttctgttaatttgaaagaacaaaaacaagacagaacttctggtactctaatcaggatgattcctaacaagtcagtcatttgtgaacttagtggactttttggttactttaatttgcatatattctccagttacatcggactctatctgtggccttgttcttcatttcagtgttaatcagctaaacagaagttgttgcttatgatgtgtgagtgaacatatgccactgcctggcctttttttcttcagagcttgttgtctttttcgctatattagactttgcagtatgcccagaagctttccttcataaaatagaaagaaaaaaacatttggcttatttttcactgtagctagtcttttatacaataatcttgtaagaaaatttcttgaattctaaatattactctttctagatttttgaaatcaaaaagttttcagtaaaaagtttcttactttattttattatattaggtagtaaaaaatgtagggttatttaccataacctgttcattaatatcagaaatttacaatagcattttaagaccatagtaggattctagcataccgtgtagtacctatggagtattgtaagagctaattgttggagatgaattgcttctcatcttgttctccagtttccattgttggtttattgcagatttgtatcctgtgtcaaattcaaggtattattgataaaccttttcaaccagcagcaagaagttcaaatttttttctgtcactgtaacagaaaacacaatatgtatataacatttatgtagcaataaatgtgccatcttttttttaacacagtaaaatagtgagttttttacatttctctttctcaaataataatgtattttgttttattttctccatctcattcgtcccagaaacactcacactgcttttcctaactgcattaccgacattatctgggaaacccttcaggacagaatcaggcttgtggagctaagttggcaatctggtctagagcttctctagcttgtgcttttctcctcttgccctcactactgacggcggccttttaaccttttcctaaagattgaccaaacagcaactagtagttatagaaaatctactcatttgtagatacagagaaaaatgaagaagatggaaaaagactcaaaagaggctttttaagttattcttcaaagcacttttcacatttccccataccctttctcacaaaaaaagtgtcataattaagtaatggtattgtttactgtttaaaagttaaaagatcaaaaatttgcttttatcccagtttttaaccacaaaaaaaagcgtagggattatccatgaggacttcatgccaagcaagaacctcaaacaaactagacaaactttttttttgacagtgaatgactttttgtaggacctgtgcgtgcgaaacccatggcaattgtcacatcctcttggtatgctggcagattgcttctcttggtgaattatgaaatccactgttcacattgggtgcctaacagaacattttgcttcttgtgggatttagtgaaaactattaaacttgttaagttgattttatacaaaacgataaataaaaagctctaagaagaaaatgtataatcttagagctgaaataaaatatagagaccatctagtaaatgacctcattaatatatctgtgaaaactgagactcagattgtatgtctctaagaacacataattagtaacagatcaagacacttaaaactttccctacaaaacctccctgccttgactttctctttctctttgcagatttctaggccgcttctgctcagtgtcttcattttcttccatatttgttttatttcatttttcttttctatagttcatgttttctttttccttggaaactcaaaatttaaacacacgtcgtgtgtgtgtgtgtgtgtgtgtctgtgtgtgtgtgacttaaagaatcttaagctttggcattaaatagtcctcgattcaaatctaagctcaacatctgattaacttcattttcctatctgaaaaatggagataacattagaattgtgtaagtattgaatgaaacaatgtatggaaagctcttatggttcttgtcacctaagaagtacttaataaatgataaatatttttaaataaataatattataaccaactcccaggatgattcctcttcagccatcctgtcagaggtaaatggtaaaataaacccccagaagatgtcaacccatctttgtaggagtctacattcttttgcagccatccaatgaaacactgcatttcttttcagtgccctcccatggctgcattttaagaggattttttttttttttttagaccttcacatttcaaaagagtgagtctggctgggcgtggtggctcacgcctgtaatctcagcactttgggaggccaatgcgagcgatacacaaggtcatgagttcatgaccagcctggccaacatggtaaaaccccgtgtctactaaaagtacaaaaattagccagctatggtggcaggtgcctgtaatccaagctacttggaaggctgaggcaggagaatcacttgaacccgggaggtggaggtttcagtgagctgaggtcacgccattgcattccagccaggggaacaagagcaaaactctgtctcaaaaaaaaaaaaaaaaaagagtgagccagtaggctttgcccagtcacactgtgtgggtggacagctgtatcagtttgggttcttaagacagatgccaagaggaagttagaagggtaaaggatttattaggagatgtacctgtgaaaaacaaaagggcaaggaatcaaaagtagacagggatggtcttcacaccatgctgcaggtttgacattaaaagaagggcaagtaaggaaggaggattaggtagggagagcctcaggctgcctgcagttctgaagaaggcccaagcagcccagtgagggtgttctggcacaaagattgccggtgaaggaggcttgtgttgggcaggaatggcaaagtatcagtgtccctgttttggtcagttattgactgggagttacatggggagactgaggcctcagtttgaacactgcaacaaaagtgctgcagctggaagccaacagctaaccactctttcccaacaggttgtctttgaagggagacctcaggtgcacctcatggcttccacagcacctcatcttcctacaaaagagcaaaataaaaccaaagggtcttctgaagtcactgagacaatagctgatctcattgggccaatgagtcttctaaaaattgcagttccttctcccttggcattccacagtcaagtaaacttacacgtattgtctggaagaatgaatcccattcctcctccatcttctttggctctggtgtgggcttatgtaatctggatacaatcccataaagttgctgtgtttagtaatgtcatttctccgtgtctgttggggactggtttcacgatcccctaaggatagcaaaatctctggatgctcatggcctttatataaaagggcacgatatttgcatacaatctacacatccccccacatactttcaatcatctctactcataatactgaatacaatgtaaatcctatgtaaatcgttattatgctgtattggttttttcgtctgtgatattttcagtattgcattgttttgttgtgaaaacagggtcttgctctgtcacccaggctgaagtgcagtggtatgatcctagctcagtgtaacctcaaactcctgggctcaagtgatcctcctgccttgacctcccagagttctgggattacaggcatgagccaccatgcccagcctgtaatggttttttgttgttgttgtttgagacagggtggtacattattgccaaagctggagtacagtggcaaatacatggctcactgcagcctcaacttccttggttcaaacaatcctcctgcctcagcctttagagtagctgggagcataagagtgcacccctatgcctagctaattttttttattttttgtagagttggaatctccacatttgccaggctgatcttaaacttatgggctcaacctatcctcccaccttggcctcctaaagtgctgggattatagatgactgcgcctggccccttgttaatttatcattagttttttttccccccaatatttttgatccatggttgcttgaatatggatatgggacctgcatgcagattagaaaggccaactgtattctggtgttcttcacaggacaagtgacactccctgcttgctgggtcagtggattgtccacgcgtctttgtggtcacctggcttaggaagctcacaaggtcctcatcatttggaggtgtttccctgtgagtgccctcagccctaggctttcttacgtgtgcctatactggaggatgtatatgggagtagagatatctttcctatgtttgttatctttctctctttagttattgccaaaagacaacctggagaggttttctgttctctttgacgcagaccttcaatcccttccccaaactgtcatgtggtacctctgctgtcttctgccagggtctcctttctcactcttgagggtcagtgttccactacgctgggtccccagggtctctgagccattttgtctttgggcttggtgagcaccatgtgcaagatttccaagtctttcaaagcttgtgaaaatgtttgcaatctgaaaaaatattacagtgccaaaagaaaaaaaatgcaaaatgaaattaatttcaaatacaattacaaaagtcatacaaaattgttatagcaaaactaaattgctgtttaatgtggaacttgagcatattttaatgtatttgatcttattaaatttggtatagaaggaatgtaccttaacacaataaagaagcatctatgacaaacccatagctaacatcctaactcactggtgaaaagttggaagcttttcctctaagatcagaaacaagacaaggatgcccactctagccacttctgttcaacatggtaatcctagccggagcaattatgcaagagaaagaaaagacagccaaactggaagaagtttaactgtccctgtttgcagataagataatgttataatacagaaaaccttactgattctaccaaaaaagttagaactaacaaatgaattcagttaagttgcaggatacaaaattcaacatacaaaaattcatagcatttctatacactaacagtgaactatctgaaaaaaaatcaagaaaacaatcccattcagaaaagttaaaaaaattaaatacttaggaataaattaaaccaaagaggtgaaaaactgatacactaaaaactataaaacataaattgaagaagatgccaataaatggaaagataaaccatgttcatgaattagaagaattaatgttgttcaaatgtccatactacccaaagtgatctacaaacttaatgcaacccatatcaaaatttcaatgacttttttcacagaaatagaaaatatcctgaaatttgaatagaaccacaaaagaccctaaatagccaaagcaaccttgagcaaaaaacaaaactggaggcatcacactacctgacttcaaaatatactaagaagttatagtaatcaaaacagtacagtactgacaacaaagaagacacatagacaatggaacagaataaagtgcccagaagtctgtgtatttacagaaaattgatttttgacaatggtatcaagaacacacatgaggaaaggacagtctcttcaataaatagtgttgggaaaattgtctacatgcgaaagaatggaattagacctttatctcataccatatacaaaaatcaattcacagtggattaaagacttaagacctgaaaatataaaattgctagaagaaaacaagatttaaaaaaagaaaataaaagaaaagaaaacaagataaaagctccatgacattggtctgggcaatggttttttaaatatgatccccaaaagcacagacaacaaaagcaaaaatagacaaataatattatatcaaactaaaaagcttcacagcaaaggaaacaacagtgaagagacaacctggaaaaaatatttgcaagccacacattctgataagggtttaatatccaaaatatacaagtcaatagcaagaaaaccaagaacccaattaaaagctaggcaaaggacctgaatagacttttctcaaaaaaaagacatacaaatggtcaacatgtatatgaaaaagtgctcgacattattaaccatcagggaaatgaaagttaaaacctcaatgagatattacctcacacatggcagaatggctattatcaaagatggcagggcacagtggctgatgcctgtaatcccaacactttcggaggcctaagcagaaggatcgcttgaacccaggagttcgaaaccatcctgggcaacagagtgagtctccacaaaaaataaaaattaaccaggtatggtggcgtgcacctgtagacccagtgacttgggaggctgaggcaggaagatcacttgagcccaggagtttgaggctgcagtgagctgtgattgcaccactgcactccagcctgggtgacaaagtgaaaccatgtctcaaaaaaaaaaaaaaaatgcacaaaagttaaggtgttggcaaggaagtggagaagagggtacccttgcacactgttggtgggaatgtaaattactattatagaaaacattataaaatcatacattatacattatagaaaacagccattatagagaacattacggaggtgctcagaaaaatagaaatagaactaccatatgctccagcaaccccactactgggtatatatccaaaggaaataaaatcagtatgttaaggaaataatctgcactcctgtgtttgttcattacagcattattcacaatagccaagatacagaatcaacctaagtgtccgtcagtgaataaatggataaagaaagcatttacacaattaaatactgttcagccttagaaggaaatgctgtcatatatgacaacatggatgagcccagaggacattatattaagtgaaatagcccaggcaaatactacatgatctcatttatatctggaatgtaaaaaaaaaaaaaaaaaaaaaaaaaattgaggccaggcgcggtggctcacgtctgtaatctcagcactttaggaggccaaggcaggcagatcacgaggtcaggagtttgagaccagcctggccagcatggtgaaaccccatctctactaaaaatacagaaattatccaggcgtggtggcacaaacctgtaatcccagctactcaagaggctaaggcatgagaattgcttgaacccaggaggtggaggttgcagtgagccaagatcacaccactgcactccagcctgggagacagagcgaaactctgtcttgggggaaaaaagaaaaattgaatgcatagacgcaaagagtagaatggtgggcctgggggtggcgagaggtggggcagtgagggagctggggagatgttggtcaaagggcacaaaatttcagtgagacaggagaaataagttcaagagatctgttgtacaacatggggactatagttagtgtatttgtgttctcaccacaaaaaaaattatgtgagataatgcatatgtcaattagctcagttgagccattcacaatgtatacgtatttcaaaacactacgttgtacacagtaaatacatacaacattttttgtcaattaaaaaaacgtttaggccgagcaccccagcattttgggaggctgaggcagaagaatcacttgaggtcaggagttcgagaccagcgtggccaacctggtgaaaccctgtctctaataaaaaatacaaaaattagctgggtatagcagcgtgcacctgtaatgccagctacttgggaggctgagacatgagaatcacctggactccagaggcagaggttgcagtgaacctggtccacagagcaagactgcactccagcctggcctacagagtgagactcagtctcaaaaaataaaaaacaacaacaaaaaaaaaaacttttaaatctatttgatacaacataggctgggacttccaaaattttaaaaaccatcctaagttccttcagtcctagagttctttttcagttatcactgtttttggttctctggcttcttgatagtctccttggaagaaaaacaactgcatctttccctctaaaggcaagggccatctctatatctctgaagatctaaccttctgccacagttcgaatatgttggaaacgtaatcccccatgcaacagtgttgaggggggttgcctaataagaggtcatgagggctctcctcccaggctgttttgccctgccgccttccaccacggatgatgtagcacaagggccctcaacagatgccagcccctccgtcttgcactttccagcctctagaattataagaaataaatttctgttattcttttttaattactcagtctcaggtattctgtcatagcatcagaatacacactaagatacctgcctaggccatgaggaccccaagacacagcacaaattttgtacaaactctaaccagaccacctttttcctactcccagggtgaggtccttccttcccctgtcccttgcagccctatgggcttttttgctttctctcattctccgggccttctgcagctctatttcctgcaagattgcatcttttctcctggatatttggtcgtcgctgggctgaggtggcagcctagtgttgggagcaggcttctggctggcctctgatcagtaagccagaggggtcaccttgtcctgaaatacaacccagccattggccatgttttccaccatcttatgagtattcccagtgaccaccctcagcagttcaagacaagttgggttacacaacaaggcagcacaataatgaagctcccacccctggcttgggcctgggcgttagaaagccctgcctgcggggggccctctcacatgcagaaggcaatgggtagtagcttcaccagacgatcctctgcctacctgctccaggtctccccctggggccatcccacctcttcctcattaaagcctgtgctgaaaggagcggggttgtttttcaaattctttcagcagtgagttattgatcaacactgatagtgcgagcagcttgatctcaccctgaactggcagagattaattagcttgattcccaagcataattcctaattaggcacaggaagaaaggaaagaaaacacaaaggaactattcttctccaggaaccaccgaccttctgtccaggggtggaggaggaagaaacaggtaagcatgtcccagcaccagagtgcttcctgcccattccaaagctgggcagccagcccgtcagcacaaacaacaccgaggacggtgccagtgccatcctgcaagggtctcagaagaaaatgtgcatttaatttgtttgctttactctctgcctaatgatgggcagggaaggcacaattaagcaggaggctttgaagtacctgctctaggcttgcttagccaccagaggctgaggatgcaagcaggggagagttcagctccaataggctggggaagaaaggttggatggggagggtgtagtggccctgagacttgagcagaaatagtgaaaggaaccacttcctgcagctgagaggcaggagccatcatgttctgttgtgggcattttctagaatgttccagccaggaccagcagctcaaatggctcttccctggtggtgggtagggcaataggagataggagggaccttcaatgtggcaactgtgaggtttggccaatcaacttacccatgctgagcttcggtttctcttcagtgaaatggggataattaatgatcgtatcagcttacatgacggttgtgagaattaactgaagaattcagagatgcatggcacataggaggcacttcctaacccacctaaagaaagcaaacccacagggcagcaaatcagaaatggatgagggctgacctcctctttattcagtagcacatgtctaatagacccgactgtgtctcgcacatgctgcccctgaggaagacttattatagggagctacaaacagtgtcacctgggaaagacagtgaactcagttatagaacaagaacacctgcccgggctgactgggggccaggatgcagggaaggctgcctggaggaagtgacatacccctgagtctcaattggccagggaaacaactgagcaatgatttgtgaaaatgagttcagtagaggttaataaaaattgggagtcctggccagtggctcacgcctgtaatcccagcacttcgggagcccaaggcaggcggatcacaaggtcaggagttcgagaccagcctgatcaacatgatgaaaccctgtctctactaaaaatacaaaaattagccaggcatggtggtgcctgcctgtaatcccagctactcaggaggctgaggcaggagaatcgcttgaacccaggaggcggaggttgcagtgagctgagatcatgccgctgcactccagcctgggcaacagagcaagactccgtctaaaaaaaaaaaaaaaagggaatccctgctgtctgcagtaggccaatcaagtgtccaagaattgtgagaatgtgcttccccatcaccaccaccagcccacacccacaccaaaatgtgtcacccttcaatcccttcaagtctgtctgctcagcatcctgatccaaacaagccactttaaaaagtgcagttatgaaacaattcgaacactgactggactactgtttatatttttagatgtgatactgtggttatgtttctctaaaagtcctt

SEQ ID NO: 2339 - DNA, 3387 bp, Homo sapiens
agcgcggtggtgaggccgcctcagcgaaaaaaatgtccgcctgaagagacccacaagttctattcggggggaccgacagcccgccccgggaggaaggggcggccaggcccgaaagccgcctccccctcccagacccgagagctcgtgcggggcaaagtgaaccgagccgctgggcggtgcaaggggaagcccaagcccgttctcccggccaaagtgaactttaatcggggtggttggatgcggagacggggcggcaggacctgctagaagtggccgaagatgaatccccagcaacaacgcatggccgctatagggaccgacaaggagctgagcgacctactggacttcagtgcgatgttttccccacctgttaatagtgggaaaactagaccaactacactgggaagcagtcaattcagtggatcaggtattgatgaaagaggaggtacaacatcttggggaacaagtggtcaaccaagtccttcctatgattcatctagaggttttacagacagccctcattacagtgatcacttgaatgacagtcgattaggagcccatgaaggcttgtccccaacacctttcatgaactcaaatctgatgggaaaaacatcagagagaggctcattttccctgtacagcagagatactggattaccaggctgtcaatctagtctcctgagacaagatctggggcttgggagcccagcacagctatcttcttcaggaaaacctgggacagcatactattcattctctgctacaagttccaggaggagaccactccatgactctgcagcgcttgatcccttgcaagcaaaaaaagtcagaaaggtgcctcctggtttgccttcttctgtatatgcaccatccccaaattcagatgatttcaaccgtgaatctcctagttatccatctcctaagccaccaaccagtatgttcgctagcactttctttatgcaagatgggacccacaattcttctgacctttggagttcatcaaatgggatgagccagcctggttttggtggaattctggggacctccacttcccacatgtctcaatccagtagttatggcaaccttcattcacatgaccgcttgagttatcctccacactcagtttcaccaacagacataaacacgagtcttccaccaatgtccagctttcatcgcggcagtaccagcagttcaccttacgttgctgcctcacacactcctcccatcaatggatcagacagcattctaggaaccagagggaatgctgctggaagctcacagacaggtgatgcacttggaaaggctttggcatctatttattctcctgaccataccagcagtagttttccgtcaaatccatcaacaccagttggatcaccttcacctctcacaggtaccagtcagtggccaagacctggagggcaagcaccttcatccccaagctatgaaaactcactccactccctgcagtctcgaatggaggatcgtttagacagactggatgatgcaatccatgtgctgcggaaccatgctgtgggaccttccaccagtttgcctgctggtcacagtgatatacatagtttattgggaccatcccataatgcaccaattggaagcctcaattcaaactatggaggatcaagccttgttgcaagcagtcgatcagcttcaatggttggaactcatcgggaagactctgtcagtctcaatggcaatcattcagtcctgtctagtacagtcactacttcaagcacagacctgaaccataaaacacaagaaaattatagaggtggcttgcaaagtcagtctggaactgttgttacaacagaaatcaagactgaaaacaaagaaaaggatgaaaaccttcatgaacctccttcatcagatgacatgaagtcagatgatgaatcctcccaaaaagatatcaaggtttcatctagaggcagaacaagcagtactaatgaagatgaggatttgaaccctgaacagaagatagaaagggagaaggagaggcggatggctaacaatgccagagaacgcttacgcgtgcgggatattaatgaagcattcaaagagcttggccgaatgtgtcagcttcacttgaagagtgaaaaaccccaaacaaaactccttattcttcatcaagccgtggcagtcatccttagtctagaacagcaagtcagagagaggaaccttaaccccaaagcagcctgccttaagagaagggaagaagaaaaagtttctgccgtatcggcagagccgccaaccacactgccaggaacccatcctgggcttagtgaaactaccaaccctatgggtcatatgtaaacatcagccagttccagagttatcagtaggctagatagaaggtgacctctcctcataaggacttggacaactcagattatctgaagacacaaacctgacaggagggagaagaaaaaacaaaacacttgaaccaagaaactcaaatgtaatcctacgatcaaagcaactggtcaacacttccatcagaagtgaagataggaagctcatcagatagaacatcagcccatgagatgtttgcaacaaatcttttgttgcaagcagtgtgtcgcttctgcacaatcagagactgtctcgatctctccactcaccgtggaagttgccttgtgcctaaactgaattgacaaatgcattgtaactacaaattttatttattgttatgaaactgtaaggtctacatataaagggaaaaagttaatgtggaaagctgatctacactcagctgatgccagcatacattaaagcggttcacgtgcagagaacaaagcagtgacaaccattggcccttagcattcccggcatacctattagtgtcttaaaaaggaagggaaaagtcttttgttgccctctcctatcctcttgccatatgaatagcgttttccatgaaataggaaaatattacttggtatagcatttctcttgctctcattttttgatttatttttattttctctttgtgggtgttatatttgatctctaaatctgaacagtttatggtcacagtccagcctcctccgtgcagccctgtgtgctttgcacatttaccttacagtggtaagcagagaccatctgtgaccatagcctagctagcattttaaaaggggaaattttgttctctaggttttcccccaaataaacattgctttatttctaataataaccaagacttttcaagcttctagatctcataggaaagcttgtaatagcaaaattgtaaattacaagggaagaatctactttttagaaatcgctttgttttccaagcagtaagtactacatacagtaagacgattttttcaggctgtgattatggtgaacataacaaaacccagtagtcaccaa

SEQ ID NO: 2340 - protein, 672 aa, Homo sapiens
MNPQQQRMAAIGTDKELSDLLDFSAMFSPPVNSGKWTTLGSSQFSGSGIDERGGTTSWGTSGQPSPSYDSSRGFTDSPHYSDHLNDSRLGAHEGLSPTPFMNSNLMGKTSGSFSKRDTGLPGCQSSLLRQDLGLGSPAQLSSSGKPGTAYYSFSATSSRRRPLHDSAALDPLQAKKVRKVPPGLPSSVYAPSPNSDDFNRESPSYPSPKPPTSMFASTFFMQDGTHNSSDLWSSSNGMSQPGFGGILGTSTSHMSQSSSYGNLHSHDRLSYPPHSVSPTDINTSLPPMSSFHRGSTSSSPYVAASHTPPINGSDSILGTRGNAAGSSQTGDALGKASIYSPDHTSSSFPSNPSTPVGSPSPLTGTSQWPRPGGQAPSSPSYENSLHSLQSRMEDRLDRLDDAIHVLRNHAVGPSTSLPAGHSDIHSLLGPSHNAPIGSLNSNYGGSSLVASSRSASMVGTEDSVSLNGNHSVLSSTVTTSSTDLNHKTQENYRGGLQSQSGTVVTTEIKTENKEKDENLHEPPSSDDMKSDDESSQKDIKVSSRGRTSSTNEDEDLNPEQKIEREKERRMANNARERLRVRDINEAFKELGRMCQLHLKSEKPQTKLLILHQAVAVILSLEQQVRERNLNPKAACLKRREEEKVSAVSAEPPTTLPGTHPGLSETTNPMGHM

SEQ ID NO: 2341 - DNA, 4697 bp, Homo sapiens
agcgcggtggtgaggccgcctcagcgaaaaaaatgtccgcctgaagagacccacaagttctattcggggggaccgacagcccgccccgggaggaaggggcggccaggcccgaaagccgcctccccctcccagacccgagagctcgtgcggggcaaagtgaaccgagccgctgggcggtgcaaggggaagcccaagcccgttctcccggccaaagtgaactttaatcggggtggttggatgcggagacggggcggcaggacctgctagaagtggccgaagatgaatccccagcaacaacgcatggccgctatagggaccgacaaggagctgagcgacctactggacttcagtgcgatgttttccccacctgttaatagtgggaaaactagaccaactacactgggaagcagtcaattcagtggatcaggtattgatgaaagaggaggtacaacatcttggggaacaagtggtcaaccaagtccttcctatgattcatctagaggttttacagacagccctcattacagtgatcacttgaatgacagtcgattaggagcccatgaaggcttgtccccaacacctttcatgaactcaaatctgatgggaaaaacatcagagagaggctcattttccctgtacagcagagatactggattaccaggctgtcaatctagtctcctgagacaagatctggggcttgggagcccagcacagctatcttcttcaggaaaacctgggacagcatactattcattctctgctacaagttccaggaggagaccactccatgactctgcagcgcttgatcccttgcaagcaaaaaaagtcagaaaggtgcctcctggtttgccttcttctgtatatgcaccatccccaaattcagatgatttcaaccgtgaatctcctagttatccatctcctaagccaccaaccagtatgttcgctagcactttctttatgcaagatgggacccacaattcttctgacctttggagttcatcaaatgggatgagccagcctggttttggtggaattctggggacctccacttcccacatgtctcaatccagtagttatggcaaccttcattcacatgaccgcttgagttatcctccacactcagtttcaccaacagacataaacacgagtcttccaccaatgtccagctttcatcgcggcagtaccagcagttcaccttacgttgctgcctcacacactcctcccatcaatggatcagacagcattctaggaaccagagggaatgctgctggaagctcacagacaggtgatgcacttggaaaggctttggcatctatttattctcctgaccataccagcagtagttttccgtcaaatccatcaacaccagttggatcaccttcacctctcacaggtaccagtcagtggccaagacctggagggcaagcaccttcatccccaagctatgaaaactcactccactccctgcagtctcgaatggaggatcgtttagacagactggatgatgcaatccatgtgctgcggaaccatgctgtgggaccttccaccagtttgcctgctggtcacagtgatatacatagtttattgggaccatcccataatgcaccaattggaagcctcaattcaaactatggaggatcaagccttgttgcaagcagtcgatcagcttcaatggttggaactcatcgggaagactctgtcagtctcaatggcaatcattcagtcctgtctagtacagtcactacttcaagcacagacctgaaccataaaacacaagaaaattatagaggtggcttgcaaagtcagtctggaactgttgttacaacagaaatcaagactgaaaacaaagaaaaggatgaaaaccttcatgaacctccttcatcagatgacatgaagtcagatgatgaatcctcccaaaaagatatcaaggtttcatctagaggcagaacaagcagtactaatgaagatgaggatttgaaccctgaacagaagatagaaagggagaaggagaggcggatggctaacaatgccagagaacgcttacgcgtgcgggatattaatgaagcattcaaagagcttggccgaatgtgtcagcttcacttgaagagtgaaaaaccccaaacaaaactccttattcttcatcaagccgtggcagtcatccttagtctagaacagcaagtcagagagaggaaccttaaccccaaagcagcctgccttaagagaagggaagaagaaaaagtttctgccgtatcggcagagccgccaaccacactgccaggaacccatcctgggcttagtgaaactaccaaccctatgggtcatatgtaaacatcagccagttccagagttatcagtaggctagatagaaggtgacctctcctcataaggacttggacaactcagattatctgaagacacaaacctgacaggagggagaagaaaaaacaaaacacttgaaccaagaaactcaaatgtaatcctacgatcaaagcaactggtcaacacttccatcagaagtgaagataggaagctcatcagatagaacatcagcccatgagatgtttgcaacaaatcttttgttgcaagcagtgtgtcgcttctgcacaatcagagactgtctcgatctctccactcaccgtggaagttgccttgtgcctaaactgaattgacaaatgcattgtaactacaaattttatttattgttatgaaactgtaaggtctacatataaagggaaaaagttaatgtggaaagctgatctacactcagctgatgccagcatacattaaagcggttcacgtgcagagaacaaagcagtgacaaccattggcccttagcattcccggcatacctattagtgtcttaaaaaggaagggaaaagtcttttgttgccctctcctatcctcttgccatatgaatagcgttttccatgaaataggaaaatattacttggtatagcatttctcttgctctcattttttgatttatttttattttctctttgtgggtgttatatttgatctctaaatctgaacagtttatggtcacagtccagcctcctccgtgcagccctgtgtgctttgcacatttaccttacagtggtaagcagagaccatctgtgaccatagcctagctagcattttaaaaggggaaattttgttctctaggttttcccccaaataaacattgctttatttctaataataaccaagacttttcaagcttctagatctcataggaaagcttgtaatagcaaaattgtaaattacaagggaagaatctactttttagaaatcgctttgttttccaagcagtaagtactacatacagtacttgtaaagtgttagctgtaagtaagcacaaaatacatttaaaatacaaagacgattttttcaggctgtgattatggtgaacataacaaaacccagtagtcaccaaggcaggtagtgtgataaatgaacacaccactctgaggctaattacctaatggaatacaagagcaatggtcacccgtatttccttatcctagcctttatttctctgtcatttggatggctggtcaatggggaagaattgagtgggtgatttaatcaactgcaaaccatctgcccctgtcccaaaatgatgagccagattagcattaaaccagtacttgtcagtccatcttaatactgttcattaaggcactctctgtctctaatccttaggagttgttttaaaagacataatcactttgaacttccatgaaacctgtcttccaccacaacaaccctgggagagaaaaacatgctaaaggaggtatcttggcttaataattccttatagccaatatcaacagtggcaatcagcacacagaggaaaggacccaaatcactatgtagcttaaagatttctgttaatttgaaagaacaaaaacaagacagaacttctggtactctaatcaggatgattcctaacaagtcagtcatttgtgaacttagtggactttttggttactttaatttgcatatattctccagttacatcggactctatctgtggccttgttcttcatttcagtgttaatcagctaaacagaagttgttgcttatgatgtgtgagtgaacatatgccactgcctggcctttttttcttcagagcttgttgtctttttcgctatattagactttgcagtatgcccagaagctttccttcataaaatagaaagaaaaaaacatttggcttatttttcactgtagctagtcttttatacaataatcttgtaagaaaatttcttgaattctaaatattactctttctagatttttgaaatcaaaaagttttcagtaaaaagtttcttactttattttattatattaggtagtaaaaaatgtagggttatttaccataacctgttcattaatatcagaaatttacaatagcattttaagaccatagtaggattctagcataccgtgtagtacctatggagtattgtaagagctaattgttggagatgaattgcttctcatcttgttctccagtttccattgttggtttattgcagatttgtatcctgtgtcaaattcaaggtattattgataaaccttttcaaccagcagcaagaagttcaaatttttttctgtcactgtaacagaaaacacaatatgtatataacatttatgtagcaataaatgtgccatcttttttttaacacagt

SEQ ID NO: 2342 - protein, 672 aa, Homo sapiens; identical to SEQ ID NO: 2340

SEQ ID NO: 2343 - DNA, 3521 bp, Homo sapiens
agcgcggtggtgaggccgcctcagcgaaaaaaatgtccgcctgaagagacccacaagttctattcggggggaccgacagcccgccccgggaggaaggggcggccaggcccgaaagccgcctccccctcccagacccgagagctcgtgcggggcaaagtgaaccgagccgctgggcggtgcaaggggaagcccaagcccgttctcccggccaaagtgaactttaatcggggtggttggatgcggagacggggcggcaggacctgctagaagtggccgaagatgaatccccagcaacaacgcatggccgctatagggaccgacaaggagctgagcgacctactggacttcagtgcgatgttttccccacctgttaatagtgggaaaactagaccaactacactgggaagcagtcaattcagtggatcaggtattgatgaaagaggaggtacaacatcttggggaacaagtggtcaaccaagtccttcctatgattcatctagagtacaatacacgagatgaagcagttaaatagcaaagcaagacagaagggtcagagaattaaaggttttacagacagccctcattacagtgatcacttgaatgacagtcgattaggagcccatgaaggcttgtccccaacacctttcatgaactcaaatctgatgggaaaaacatcagagagaggctcattttccctgtacagcagagatactggattaccaggctgtcaatctagtctcctgagacaagatctggggcttgggagcccagcacagctatcttcttcaggaaaacctgggacagcatactattcattctctgctacaagttccaggaggagaccactccatgactctgcagcgcttgatcccttgcaagcaaaaaaagtcagaaaggtgcctcctggtttgccttcttctgtatatgcaccatccccaaattcagatgatttcaaccgtgaatctcctagttatccatctcctaagccaccaaccagtatgttcgctagcactttctttatgcaagatgggacccacaattcttctgacctttggagttcatcaaatgggatgagccagcctggttttggtggaattctggggacctccacttcccacatgtctcaatccagtagttatggcaaccttcattcacatgaccgcttgagttatcctccacactcagtttcaccaacagacataaacacgagtcttccaccaatgtccagctttcatcgcggcagtaccagcagttcaccttacgttgctgcctcacacactcctcccatcaatggatcagacagcattctaggaaccagagggaatgctgctggaagctcacagacaggtgatgcacttggaaaggctttggcatctatttattctcctgaccataccagcagtagttttccgtcaaatccatcaacaccagttggatcaccttcacctctcacaggtaccagtcagtggccaagacctggagggcaagcaccttcatccccaagctatgaaaactcactccactccctgaaaaatcgagttgagcagcaacttcacgagcatttgcaagatgcaatgtccttcttaaaggatgtctgtgagcagtctcgaatggaggatcgtttagacagactggatgatgcaatccatgtgctgcggaaccatgctgtgggaccttccaccagtttgcctgctggtcacagtgatatacatagtttattgggaccatcccataatgcaccaattggaagcctcaattcaaactatggaggatcaagccttgttgcaagcagtcgatcagcttcaatggttggaactcatcgggaagactctgtcagtctcaatggcaatcattcagtcctgtctagtacagtcactacttcaagcacagacctgaaccataaaacacaagaaaattatagaggtggcttgcaaagtcagtctggaactgttgttacaacagaaatcaagactgaaaacaaagaaaaggatgaaaaccttcatgaacctccttcatcagatgacatgaagtcagatgatgaatcctcccaaaaagatatcaaggtttcatctagaggcagaacaagcagtactaatgaagatgaggatttgaaccctgaacagaagatagaaagggagaaggagaggcggatggctaacaatgccagagaacgcttacgcgtgcgggatattaatgaagcattcaaagagcttggccgaatgtgtcagcttcacttgaagagtgaaaaaccccaaacaaaactccttattcttcatcaagccgtggcagtcatccttagtctagaacagcaagtcagagagaggaaccttaaccccaaagcagcctgccttaagagaagggaagaagaaaaagtttctgccgtatcggcagagccgccaaccacactgccaggaacccatcctgggcttagtgaaactaccaaccctatgggtcatatgtaaacatcagccagttccagagttatcagtaggctagatagaaggtgacctctcctcataaggacttggacaactcagattatctgaagacacaaacctgacaggagggagaagaaaaaacaaaacacttgaaccaagaaactcaaatgtaatcctacgatcaaagcaactggtcaacacttccatcagaagtgaagataggaagctcatcagatagaacatcagcccatgagatgtttgcaacaaatcttttgttgcaagcagtgtgtcgcttctgcacaatcagagactgtctcgatctctccactcaccgtggaagttgccttgtgcctaaactgaattgacaaatgcattgtaactacaaattttatttattgttatgaaactgtaaggtctacatataaagggaaaaagttaatgtggaaagctgatctacactcagctgatgccagcatacattaaagcggttcacgtgcagagaacaaagcagtgacaaccattggcccttagcattcccggcatacctattagtgtcttaaaaaggaagggaaaagtcttttgttgccctctcctatcctcttgccatatgaatagcgttttccatgaaataggaaaatattacttggtatagcatttctcttgctctcattttttgatttatttttattttctctttgtgggtgttatatttgatctctaaatctgaacagtttatggtcacagtccagcctcctccgtgcagccctgtgtgctttgcacatttaccttacagtggtaagcagagaccatctgtgaccatagcctagctagcattttaaaaggggaaattttgttctctaggttttcccccaaataaacattgctttatttctaataataaccaagacttttcaagcttctagatctcataggaaagcttgtaatagcaaaattgtaaattacaagggaagaatctactttttagaaatcgctttgttttccaagcagtaagtactacatacagtaagacgattttttcaggctgtgattatggtgaacataacaaaacccagtagtcaccaa

SEQ ID NO: 2344 - protein, 640 aa, Homo sapiens
MKQLNSKARQKGQRIKGFTDSPHYSDHLNDSRLGAHEGLSPTPFMNSNLMGKTSGSFSKRDTGLPGCQSSLLRQDLGLGSPAQLSSSGKPGTAYYSFSATSSRRRPLHDSAALDPLQAKKVRKVPPGLPSSVYAPSPNSDDFNRESPSYPSPKPPTSMFASTFFMQDGTHNSSDLWSSSNGMSQPGFGGILGTSTSHMSQSSSYGNLHSHDRLSYPPHSVSPTDINTSLPPMSSFHRGSTSSSPYVAASHTPPINGSDSILGTRGNAAGSSQTGDALGKASIYSPDHTSSSFPSNPSTPVGSPSPLTGTSQWPRPGGQAPSSPSYENSLHSLKNRVEQQLHEHLQDAMSFLKDVCEQSRMEDRLDRLDDAIHVLRNHAVGPSTSLPAGHSDIHSLLGPSHNAPIGSLNSNYGGSSLVASSRSASMVGTEDSVSLNGNHSVLSSTVTTSSTDLNHKTQENYRGGLQSQSGTVVTTEIKTENKEKDENLHEPPSSDDMKSDDESSQKDIKVSSRGRTSSTNEDEDLNPEQKIEREKERRMANNARERLRVRDINEAFKELGRMCQLHLKSEKPQTKLLILHQAVAVILSLEQQVRERNLNPKAACLKRREEEKVSAVSAEPPTTLPGTHPGLSETTNPMGHM

SEQ ID NO: 2345 - DNA, 4765 bp, Homo sapiens
agcgcggtggtgaggccgcctcagcgaaaaaaatgtccgcctgaagagacccacaagttctattcggggggaccgacagcccgccccgggaggaaggggcggccaggcccgaaagccgcctccccctcccagacccgagagctcgtgcggggcaaagtgaaccgagccgctgggcggtgcaaggggaagcccaagcccgttctcccggccaaagtgaactttaatcggggtggttggatgcggagacggggcggcaggacctgctagaagtggccgaagatgaatccccagcaacaacgcatggccgctatagggaccgacaaggagctgagcgacctactggacttcagtgcgatgttttccccacctgttaatagtgggaaaactagaccaactacactgggaagcagtcaattcagtggatcaggtattgatgaaagaggaggtacaacatcttggggaacaagtggtcaaccaagtccttcctatgattcatctagagtacaatacacgagatgaagcagttaaatagcaaagcaagacagaagggtcagagaattaaaggttttacagacagccctcattacagtgatcacttgaatgacagtcgattaggagcccatgaaggcttgtccccaacacctttcatgaactcaaatctgatgggaaaaacatcagagagaggctcattttccctgtacagcagagatactggattaccaggctgtcaatctagtctcctgagacaagatctggggcttgggagcccagcacagctatcttcttcaggaaaacctgggacagcatactattcattctctgctacaagttccaggaggagaccactccatgactctgcagcgcttgatcccttgcaagcaaaaaaagtcagaaaggtgcctcctggtttgccttcttctgtatatgcaccatccccaaattcagatgatttcaaccgtgaatctcctagttatccatctcctaagccaccaaccagtatgttcgctagcactttctttatgcaagatgggacccacaattcttctgacctttggagttcatcaaatgggatgagccagcctggttttggtggaattctggggacctccacttcccacatgtctcaatccagtagttatggcaaccttcattcacatgaccgcttgagttatcctccacactcagtttcaccaacagacataaacacgagtcttccaccaatgtccagctttcatcgcggcagtaccagcagttcaccttacgttgctgcctcacacactcctcccatcaatggatcagacagcattctaggaaccagagggaatgctgctggaagctcacagacaggtgatgcacttggaaaggctttggcatctatttattctcctgaccataccagcagtagttttccgtcaaatccatcaacaccagttggatcaccttcacctctcacaggtaccagtcagtggccaagacctggagggcaagcaccttcatccccaagctatgaaaactcactccactccctgcagtctcgaatggaggatcgtttagacagactggatgatgcaatccatgtgctgcggaaccatgctgtgggaccttccaccagtttgcctgctggtcacagtgatatacatagtttattgggaccatcccataatgcaccaattggaagcctcaattcaaactatggaggatcaagccttgttgcaagcagtcgatcagcttcaatggttggaactcatcgggaagactctgtcagtctcaatggcaatcattcagtcctgtctagtacagtcactacttcaagcacagacctgaaccataaaacacaagaaaattatagaggtggcttgcaaagtcagtctggaactgttgttacaacagaaatcaagactgaaaacaaagaaaaggatgaaaaccttcatgaacctccttcatcagatgacatgaagtcagatgatgaatcctcccaaaaagatatcaaggtttcatctagaggcagaacaagcagtactaatgaagatgaggatttgaaccctgaacagaagatagaaagggagaaggagaggcggatggctaacaatgccagagaacgcttacgcgtgcgggatattaatgaagcattcaaagagcttggccgaatgtgtcagcttcacttgaagagtgaaaaaccccaaacaaaactccttattcttcatcaagccgtggcagtcatccttagtctagaacagcaagtcagagagaggaaccttaaccccaaagcagcctgccttaagagaagggaagaagaaaaagtttctgccgtatcggcagagccgccaaccacactgccaggaacccatcctgggcttagtgaaactaccaaccctatgggtcatatgtaaacatcagccagccacagttccagagttatcagtaggctagatagaaggtgacctctcctcataaggacttggacaactcagattatctgaagacacaaacctgacaggagggagaagaaaaaacaaaacacttgaaccaagaaactcaaatgtaatcctacgatcaaagcaactggtcaacacttccatcagaagtgaagataggaagctcatcagatagaacatcagcccatgagatgtttgcaacaaatcttttgttgcaagcagtgtgtcgcttctgcacaatcagagactgtctcgatctctccactcaccgtggaagttgccttgtgcctaaactgaattgacaaatgcattgtaactacaaattttatttattgttatgaaactgtaaggtctacatataaagggaaaaagttaatgtggaaagctgatctacactcagctgatgccagcatacattaaagcggttcacgtgcagagaacaaagcagtgacaaccattggcccttagcattcccggcatacctattagtgtcttaaaaaggaagggaaaagtcttttgttgccctctcctatcctcttgccatatgaatagcgttttccatgaaataggaaaatattacttggtatagcatttctcttgctctcattttttgatttatttttattttctctttgtgggtgttatatttgatctctaaatctgaacagtttatggtcacagtccagcctcctccgtgcagccctgtgtgctttgcacatttaccttacagtggtaagcagagaccatctgtgaccatagcctagctagcattttaaaaggggaaattttgttctctaggttttcccccaaataaacattgctttatttctaataataaccaagacttttcaagcttctagatctcataggaaagcttgtaatagcaaaattgtaaattacaagggaagaatctactttttagaaatcgctttgttttccaagcagtaagtactacatacagtacttgtaaagtgttagctgtaagtaagcacaaaatacatttaaaatacaaagacgattttttcaggctgtgattatggtgaacataacaaaacccagtagtcaccaaggcaggtagtgtgataaatgaacacaccactctgaggctaattacctaatggaatacaagagcaatggtcacccgtatttccttatcctagcctttatttctctgtcatttggatggctggtcaatggggaagaattgagtgggtgatttaatcaactgcaaaccatctgcccctgtcccaaaatgatgagccagattagcattaaaccagtacttgtcagtccatcttaatactgttcattaaggcactctctgtctctaatccttaggagttgttttaaaagacataatcactttgaacttccatgaaacctgtcttccaccacaacaaccctgggagagaaaaacatgctaaaggaggtatcttggcttaataattccttatagccaatatcaacagtggcaatcagcacacagaggaaaggacccaaatcactatgtagcttaaagatttctgttaatttgaaagaacaaaaacaagacagaacttctggtactctaatcaggatgattcctaacaagtcagtcatttgtgaacttagtggactttttggttactttaatttgcatatattctccagttacatcggactctatctgtggccttgttcttcatttcagtgttaatcagctaaacagaagttgttgcttatgatgtgtgagtgaacatatgccactgcctggcctttttttcttcagagcttgttgtctttttcgctatattagactttgcagtatgcccagaagctttccttcataaaatagaaagaaaaaaacatttggcttatttttcactgtagctagtcttttatacaataatcttgtaagaaaatttcttgaattctaaatattactctttctagatttttgaaatcaaaaagttttcagtaaaaagtttcttactttattttattatattaggtagtaaaaaatgtagggttatttaccataacctgttcattaatatcagaaatttacaatagcattttaagaccatagtaggattctagcataccgtgtagtacctatggagtattgtaagagctaattgttggagatgaattgcttctcatcttgttctccagtttccattgttggtttattgcagatttgtatcctgtgtcaaattcaaggtattattgataaaccttttcaaccagcagcaagaagttcaaatttttttctgtcactgtaacagaaaacacaatatgtatataacatttatgtagcaataaatgtgccatcttttttttaacacagt

SEQ ID NO: 2346 - protein, 616 aa, Homo sapiens
MKQLNSKARQKGQRIKGFTDSPHYSDHLNDSRLGAHEGLSPTPFMNSNLMGKTSGSFSKRDTGLPGCQSSLLRQDLGLGSPAQLSSSGKPGTAYYSFSATSSRRRPLHDSAALDPLQAKKVRKVPPGLPSSVYAPSPNSDDFNRESPSYPSPKPPTSMFASTFFMQDGTHNSSDLWSSSNGMSQPGFGGILGTSTSHMSQSSSYGNLHSHDRLSYPPHSVSPTDINTSLPPMSSFHRGSTSSSPYVAASHTPPINGSDSILGTRGNAAGSSQTGDALGKASIYSPDHTSSSFPSNPSTPVGSPSPLTGTSQWPRPGGQAPSSPSYENSLHSLQSRMEDRLDRLDDAIHVLRNHAVGPSTSLPAGHSDIHSLLGPSHNAPIGSLNSNYGGSSLVASSRSASMVGTEDSVSLNGNHSVLSSTVTTSSTDLNHKTQENYRGGLQSQSGTVVTTEIKTENKEKDENLHEPPSSDDMKSDDESSQKDIKVSSRGRTSSTNEDEDLNPEQKIEREKERRMANNARERLRVRDINEAFKELGRMCQLHLKSEKPQTKLLILHQAVAVILSLEQQVRERNLNPKAACLKRREEEKVSAVSAEPPTTLPGTHPGLSETTNPMGHM

SEQ ID NO: 2347 - DNA, 73455 bp, Mus musculus
  misc_feature (1)...(73455): n = A, C, G or T/U
cagtccgggcgccagagccctcgggggaagggagccgtggcactcgggaaaacttctgcacaagatggccaggcgctgagtgcctgggcgcgcacagtcccctgcagcaacagcagcagagaggaggtccatggcggtggccgagctctacgcgcaggtaggggcgcggggacgcacctgtgcacctgcccagacgggtagatgagcggaggccgggagcagctgccagctccgcccgggccccctgcgggtgggcaaacccaacggagggctgctgtccccacgccgggtagctagatcacccagacccttcgtcccgccactgatggaatctgagtcccgcagtgggcaggagcttcgatctggcaccacaaactttgttaaccagcgttgtaaccttccaggccctcggagtctggaggactccggcaagattggcggtgttttctagaatgctggtgcgcttccctgtgcaggcgaaggaagacactcgggggatccacctggagttgcccggtctgagcacaggaaccagcagcccagagtcccaggccccgggtgctgttgggctctttttaaccagtgtaagggtgcattaactcagagagcacctcagacaggcctgaccgggagcacatgcattctggaaaacttccagaagcgaagagcttcatcctcacccaggaaaaaaatgtgagaaaatgacgctttttaaaagagccataaaacagatcctgctacactcttgtaggggaatttagacccttcaaattctgacagatgggactagaatggattctgttagaacatttacacacacacacacagagagagagagagagagagagagagagagagagagagagagagagagagagagaggcgcgcgcatcttaacttaattggccggggaaggggtgggggaggtattgtttagttttggattttgtttgttgagactgtctcactgtgtcaccccaggtagcctggacatcactactggctggaaatcaggctgacttcaaactcacagttttgtctgcctctgcctccagagtgctgagactaaaggtccatgctccaccaagtttttaagagaggttcttgctttgtgtccctggttggaatggccctccgtccatagctcaggctgacttcagactcacggagatcttgcctcagccacgatagcgatggtattacagacataccccacccctcctatctttctgccttatatttaaaaggcactttcaccatctctgtatagtaaaagatccttgtcacgcttatctttccgtcggggttggaggaagattttcttctactttgtttaatgaataaattgcaagcacacatcaaacaaagaggaaatccctctgatgctgaccaattctgcactttatcccagtctcaagctggggaccgaaccaagggccttgtgctttctgggcaagcattctaccacgagctcagcccctcatctagaagatgttactagagacagtgtgaaccaccaggtgacctaaatgtttctaagtcttcatgtgattatcgggaaggggggggggatctttaatgaaccctgccttgttgggtatctttggggacaggtggctgatcaccaacctgttttgagtaacaatttttcttaaagcaaaaacacaggtatacttatctgtatctgtgttacttacctataatctcagcactcaggaggctgaggcaagagaattgccttgggtttgaggttagcctgggctacacagtgagttccaggcagctagggctaagaaacaacactttttctcaaaaataagttaagatattgtggaatggtgggggtatggtggcgtccagatttttctgtaggaagaaactttgttgggggtgggaaggatgtgcagcggttgtggggggcagagagaaaggtgttttgttctggaattgttttgcctgccaaggtattttctggttctttgacttgagaaatgacaagcagttgtctcgtgaggcctaagagagtatgagggggagacagctggagcagagggtcacttggcaaagatggaggttttgggtggaaacagggatcgggtggtagtttagcagctagatgagccgcttcctcaggatcccaggcattcggggatcaggagagaccctagacacagagggagggtggagacaggaaaggagaaacaggcctgggaatatcagaacaagggacacaccaaggatgacctggcgtctgtgtgattgagaacagggcgtgtatgagcggcaggagagccattaggagaaggaagtgttcctgagagaggtcatgaagcacgtttagttttaaccagcgttgtgttgaagtggtgaggagacacagggaaaatgagtggggcgtgcacagcgtgggaatgagctcagccctcagaggggagcccttgacccatctgtggtcacaaaactgtggcaggagcacccaaagaagggcaaggccaggacagaggagtgtctgcatacccagagagcagcagccaatcccaggtgagttaggaggagcctgaagggctggggagtaccaggaagagaggttcccagagggagaggggactcctgagagaggccagggtgtaggaagtgcagagcaacccacctgtctccacagcagcaggccctggaaactttcagagcaggattacttgaaatcccttcgagaaaaactggtctgaccaatccccacttaaaacctgggttttgtccctctcaagtcccaacccagccataagggccctattgtgttttataaaatatgaggagagagggaatatgtttggtgcaggtgcagtcaggtgtcggggaaaggggtgcctctgcaggtctatgctgtggcgtcnnnnnnnnnnnnnnnnnnnnnnnnnnnnnnnnnnnnnnnnnnnnnnnnnnnnnnnnnnnnnnnnnnnnnnnnnnnnnnnnnnnnnnnnnnnnnnnnnnnnnnnnnnnnnnnnnnnnnnnnnnnnnttttatatcgagtcaggcacacctggctgttgcaaggtaactgtggggcagagcctagactaaatgtcaacaggcctgactctgcaacctcatctagcccctgccacttctcctagctggctcataccctgctaggcagcttgcctattcttcatagcttggcctgctggctcagcacactgcatcgttcaggagcaagcacaccactcagattccacccaagcagaccctgagaagtccttggccagccctccgtccagacctggtacactgttaacatggtcaatttggagactcctctgtggactgctagcttgtaaagagcagggcatagtgagaacactctaaatgcttgcctgtgcacacatgcaggaacgggaaattctatttacagccacagcggtgggcaggatggttatttttaatcttgcacgaatatttctatgcaccagacatcatcctcagaaacgtcttttgatctgaagtagtctagaaaaaaaaattctatgcgttaaacctttacatcccattctgtacggcactcagatcaaggaagttgtctaaggttacacggtcctgacacagtcagatccgtaatgcaatctgcctctcaatgccttgacctgggccccatctttgtcatcttcaaggaatctaagctgtttcccacacaaaggactcatggaaagtccatctgttttctacctatatatagtaactatagaaccaaccccagtgtccagcaagagagagaaaaaccagttacaaggctccatctacaaggtgaaggttacaaggccccacccacaaggtgaaggtcagggaaccatgcaaacatagtctcggaacttcacagtggcacgggaagggcctatatagaacaaaagccccaaccctggacatgcttggtcactgctgagaaaggtgggaggagcaaaagctgtcccaggcccttctccaatcagcccctccactgggcatgtcaccttgtctcagctgctcatcaggggcctgtgggcctgcaggctccaacctcctgggctgtttggtttttagcagagctggcctatgctttgcccagaaaggtacagtcatttaatttgtacctgtcttgcttgaacatgaagaattcatgggagagattgggaacaccagggtggcatagctgtagacccatgaggaactcgttaaaaagctagagtcaccattgtttgatctatatgggtagttcaaaaagtcaaaaatgaagacaggtccaagaatccaaaatgctatcggcagtcggcctcatccacccctcagcgtcccgcatcagctgggcactcacagatacctttatccaaacagtatcaccccttgaactaggactgtgaattgccaaggactttgcggtctggtgtctgaaggcattggaaatgcaatcttgagatccattaaaagatcttggctgtgggctcaaagaggcaggcgctgggacagctgggaaagtagctagaactctctagaaacagtttatcacgtggaagggacagagatctcagagaggggcctacaaggaacagagtgaagaggaagaaaacagaggcatgatgtcacctgtttggctcacgtgccctgagcatggagattccaatccaggaagtacagccaagagaaggctcctgtcggcacacattccgtgtcggccttcaggccatgtgcatggtaaatgccagcagcccctcagacaggtgggtcacagctccctggtgattatgacctgggaggatccagcataaccttgagcccctattgctccctcaaggctctctggtcctagctttcttgcattctctaggcctcttggtgtggaagcccagcaaaggcctagaggcagccttttggctcttggccctgtggcaagcttggctggccattccaggatgtaggcttctgtctcacaggccagaagcatacaggaatcatgtgagagttggtcactctgtttacacagcttgtgcatatttgtctaaatgcttcacttagctctcactgtggtttaaagtgttgccttatggatagaggaatgtgaggaaggagggcactgtccatggagctgagtaaactggagtgtttgctcagcaggctgggtttcaggtgcaggactctggatcgcaggcagtggatggaccgggacagtaggaccagtgggcatggttacctgggatgcggaggtgcagcaaaggagaggagagtggtcatgtgcattttaacaccgccagccactgaatgaaacttgtagctgaaatgaatccagaggttgctaggagagcactggacagtcaggcagatagcttctcagggtcatcctcagagccacccacacttcaaggcagaagtcacaggcgcactcctggcgactttggtcctttaagattctctctggtgtagaacacaattcaaaggccaaagacagttggcctgtctgggtttgaattgaaacatcagtaaaacaaaagcactggccagcccagtggttgcttagtagctcccagagccccgggttcctctgaaagtttggacctaacggagctcaccctccagcaggactcctgtctgtctgaacacctcaaccttctcccgattcacacagcgtctgaaacaaactatcttccgctataaacttgacagacagatcacagtagatcattacaaggatacttttagctctgaaattttataatgggcagttcttattaccctgggatattgtatattgataatttgaggtttgtttggttataaacaaacatttctctctctttttttttcttttggaaatcttttttcgtctattcttttctcatacattatatcccaactgcagttgaccctctctccattcctcccagccctgccctcacacttccttccccaagatccactcctcctcctccattaaccttaaaaaaaaataaataaaaagattaaaaaaaaacacagatcttccacagatatacacagagcatggcttaacaactcacagtaacaaaccctcatatcaagtctggaggtgtcaacccaggaggagaaaaagggccctaagagcaggcaagagtcagagacacccacactcccactgttagggatcccacaagaaccccaagctacacaaccatcgcatatattcagaggacctccctcagacccatacagcgtccatgattgtcacttcagcctttgtgagcccctatgagccctgcttagttcatccaggggactgtggtgccctctatgcctctggctcctgcaatcctcacccccacccccactcctgtgggttttcccaggctccacctagtgataggcaaacatttctagtagcagacctgaggtaggagatgtgtgtcatgatgacaaggatgcatgttgtgggtgtgggtatatctaagaggcgggtctatgtgtgcagggctccatgcaggtctgggtcattgcctgattgcctgctgggataggttagtcctccattctcatattcattctttctctccctccctcctttttttgccctcccccctcccatgtctctcccaccttctcccctccccctctctttcctttctctcagcctctctctctttctctcaaagcttccctattccagttttacatctaaccaagctcctttgcttacagtctaccaaggattaaatctactcagatgacttagtcatgatcaatgtttgatgactgtctgtgaatcaagacgttttatgttagctaatagataacaacccttgcccagcctgtctagtatggatgccctagacttctttcttttcctgttctacgtttcctccaaccacctcttgaggctcatgagcttaaagaccgtaaaggaactctataagaaggctctatgtccaatcccaattccagtgtgaatatttcctctgttctttgacatgtctgtctgtcctctagccttccatcctgcctgcagttcatgaagtttcctaaagcactctgagtaacagggagccccaacataccctctatatacttgagtaggtgtctactaaccgctctcacatttgttcagtccattacagctggttaaatatataaatctcaaccttttgtccagtttccagagagtttaggacctgtgtcaggtacaaactccatcaaaatatagagttcgggctggagagttggctcagtggttaaagcatttgtcatgtgagcctcacagtgggattcggttctccaaagcatgtgtaaaagccagaggccatgtaaagttaccacaccctacagggagatgggagatagagaagggaaacttcgcagaagcttgcacgctggccagcctgacttacatggctgcaaagagaccgtctcataatttgattgttcagaattggttttgtttaaggtttacatattttcctatgtttacatgtgtgtacctgtatgtgatatatgcaagcagtagctatatacaggtgccaatataggccagaagagggcatcagatgccttggaattggggttacaggctgttgtgaacatcctgctttgggtgctgaaaacaaaaccctagtcacctatgagagcaacaaatgttcttaaccactgagccggcttcccccgcccctaacttgctttgtaattgaaaaccttggctgtgtcgaagatatgatcacttcactgaagggagttttttctgtagtcataaactttgccctcagggttaggaagaaatagaggttcgcaagagacatggctacttctatttgtcccctaaacccagaatgtgtgtggtgtaaatacagactcaaggactggctacacatgcagacgagcagattgtcatcttgaaggcttgacagttagctgctgccccaggagtctgcattgtgtgtgtgtgtgtgtgtgtgtgtgtgtgtgtgtgtgagtgtgagtgtgtgtgtgtgtgtatctacctgtctccaccccacccccactccaagctcaggattatgaacatgtcttagtcactgttctattgctatgatgagacggtctgaccaaggtaacttgtataaatggaagcattcaactggggccaagcttacagttttagaggtgagttcatggccatcgtagcagaaggcagacaagcatagcgcttgaacagtagctgggagcttttcatcctgacccacaggcaccaggcagagagaaagacactggactaggaatgagcctttagaacttcaaagcccactcccagtgacacatctttttcaacaaggtcaaacctactccaacaggaccatacctcataatcctccccaaacagttccactaactggaaactaagcattcaaatatatgagcctacgagggccattctcattcagacagccacagagtataaagcgcaatgcctagcttctttatgtaggcttttggagctatatgcatgtcttcaggctttcaaggtgtcttggttagaatttttttttctttttcttttttgtcaacttgatccaagccaggttcacatgggaagagggaacatcagttggggaaatatctccattagaatggccactaggcaagtctgtgtgggcattttcttgattaatgaccaatgtgggagggcctaacccattgtggacaagattaacctcataaggtggccctgggctctataagaaagcaggctgagcaagccataggcagcaagccagtaagcaggaccccttcatggcctctgctttggtttctgcctccaggttcctgccctgtttgagttcctgccttggcttctcttaacgatagactatggtcaggatgtatgagccaatcaagcttttcctccccagcttgcttttagccagtgttttattattattattattattattattattattattattattattacagcagcagagagcacagcactgttttgcaaggcaagcacttttcctgagtggcatcgcccagcccctaggttctgaaatccttacaatcaccttcagaaagtcgatctgccacagggaaggatagagattgtccttagttggggttcttatcgctgttgttcttggtactgcacagtgtctctgtgtgagggtctccagttcatgctcctgtttgcctacctatttcccagcacagtgggctctcctgtaggattgggagcctacactagtactttgtcttgtctcctttgtttaaaaattacattcattcaattatcggaggctgcgtgtgtgccatggtgcacaggcacaagtcagaaaaagacttcaaaattgattctctccttctaccacctagatcccagagatggaactcaagctgccaggcctggtggcaaacacctttatccactgagacatcttgccagccctgccatgactcttcttataaggccaatgtttctataaccccatcctgtcacaggacttcattgaagactcggtgacctctgaggccccagtcttcaaacacagtcacatcaggggtcaggactgcaatgatgcagggattctggagggacacagtttaggagcacagtaggacctgttccacagcactgacaggagcccgccagctgcctgctgcgaagagagctgagctgtacctgtaatcccggccctcagaaggctgaggcaggagattgccagtttcaggccagtctggaaaacaggctaagaccctgcttcaaaacaagagcagtctgagataatgcctctgtaatggtatttctttagtattttacggagtgccttaatttgcttgttttctttaatttgcttgtcttgttttagaaatagggccccatgtatcccagggtggccttgaactccatatatatccatgaatgacccaaaagtcctgacttcccccacccgagtgttatgatagtatgtatgcaccattgtgtcttgtgtattcattcagtcctaagggtacaacccaaggcttcaatcacgccagacagcactgtaccatcaaagccacatattcagccccaaatgcttcctattcttagcctcctagcacccgtgtaaagtgaagtgtgtgccattttatgggtaaaaagaggaggtgcaagaagctaaataagtagtctattaatggaagccaaaaatcctctgcccgagtctcgtagaaagtccccacttcctattagggaaccctcagatttccttcccaccccaagtttgcagttttcatgatctggtcatgaagctttgaagctcggctgcctaggagacagggctggtaagcctagtggtgcattgtagatgcactaaaatttaccttctcgcagcaggaaaggaggtgctagtattctgagatgatggtgtgcatgtaggtgtgtgtgtgtgtgtgttcacatttagaggccagaggtcaccatgtttgttgagacagggtctcactggaatctagaactcactggttggctagggtggctgctggccagcctaccttagggatcaccagggttataaaaatcttgtctggcttcttacttggctgctggggattgaacaggcccctgtgcttaatctggcaagcgcattacctatggaattatcccttaacctcgagagtcttcttaatgtacaggttgatccagttgaccggatgtaatcctgctcctgtgggggtctaatgatctgtgtttggagttttcaaatgctgagattaaacctgtcttatcctgtggtcagtacaacagggtttggatcccagatcctgaggaagtttggaagtcggctgaaatcgcaaaggactacagagcgggtgaccgagtcctcagacttctgctggaggatggcatggtgagggtctctgcggtctgtagtggataatgacatatacagtcatgacaccagggcaccaacagaaggtccagagggacagtgcaggcgaaggaacctgccccgtatccaggaaggccagctagggctgggggtgccttcctgctgctccacaccagcagtctgtccatctatacgaggttccagattcgtctccagatgtgtgcctctgctgtgttccaagtgctcagccatcagctgctgcagtttctgggtctcactcagtacagcctgggcagaggaggaacttggagggaagtagtctgatcccgaggcaggatccagatgggaagagggagctcgctctcggggagaggtaggaggtgtggaaggagactgcagagctagaaagccaatctagggtgtatagattatataagggctgggagggtgtgtggagggcacagagacagaaccagaaggctcgggcttcctccaacgctccagtgggctgtgctgctgcagagttacagccacaggccatcccagtcttttgatcatcagcaaccaaagatttcattatcagctttaagaagccacccctctgggttcacagctaacactgactttgtgctgttagactcaagtgttagatgcaaagctggatcaactctctgtgctccattggattcaggggtgggcggggaattccttataaacgttcaatgctgcaatttacaaaatacacagagacatgccacatactacttccgggcatctggtcctggatatcagacctttcctgagatctcagaagttgcagagaaggaaagatccatgctctggggtcaggcatcaccacttgttaagtccgtatcccttactctccacacacagccaaggagctaatgacattgtgacatcacaggtcctgaagtggaggcatcttgcagggtggcttgctcttcagtagctctctgtaactgaacgccacactgggtcctaagtacctcaggaagctgagcctagggagggaagacttgagaaagcagctgcttgtgcaattagccggctccaggtggctgttccctggccagggacgcagaatggcaggcagccagtgcctcttaccttaacccttccttgtaccagaggacaaagcttgctttgtgaagagtatgtcacccctgcctccatctctcagtctcatgttttcccctcccccagagatgactagctagctgataagctctctctttctccctctctccctcctccccttcaacgtgtcaactaaggacccacttggcaatttcagagccatgaggcaccttaggctgtgttgtcctagcaacagcatctttccacgtgtccattcccaaggcccctatggtagacatagggtggggccactggatgcatgctcatgggcttcctaccaccttccatcacagcctcttcagctctgaggaccccttcacagaagaggggagtcaggtagaggaaggggacttgctttaagacacacagtcaatgatctgatgccctggctcccagtttttcattgccttgagtcacctataaaggttatttcctttttcctctacttaaagtttctaagacaggtgtggtgacactcaacctgtattcccagcagttctgaggcaggaggatagagggtttgaagtcaatttggactacctagtaaaggactttgtctcaaaaaaatgttgtgggggctggagaaatggctcaggggttaaaattacctgctgcccttgcagaggaccggggttcaatccagggacccacatggtgactcacagccatttgtaactacagctccaagggggggaaatccaacgtccccttgtggctgctgcaggtactgcataaatgtcatgcatatacacactagcaagcaaaccatccacacacatatacccacacacaaataacctcttaaaaagtgtggggtgtggttgttttgatttgggttttggtggtgttgttttaatgtgagaagtgcgtctatgggaggtggataggaggagacagtttagcagaaataccgaaggtcctctatttctagaagtttacgtctgtctttgtttataggagctggaataccctgttgacccagggtcactgcctccgcttcggaaccctgacatcctggtgggtgagaatgacctcacagccctcagctacctccatgagcccgcagtgctgcataatctcagaatccgcttcgcagagtccaaactcatctacacctacagtggtaaggatacagtacgacaccctcacccccaggcctaccgtctgcgtgccccgagcactctcgatgctgagtgttgagagtgtgtgtaaaaagaggtgtctgtgtaaggagaactgctcgtgggaacgaagatggactaggaggaaagatcaccatgggctcgtgtctgagtctctcaccacatccaacacacttattacttcttgggacattgttgtcattgttacatttacgttgggactttcaaaaacgcagttcttttccccatgtgtcaccccacccagacatcagaacagccttagaggaaggtgactgtcagataaccgagattcagagcattgagtgactggacccaggtcaagcacaagctttcagtgaagaactggagaggcaggtggatctctgagttcgaggccagcctggtctagaatgagttccaggacagccacggctacacagagaaaccctgtctcgacaaaccaaaaaaaaaaaaaaaagaatttaaaaagaactgggacttctggaaaaagcctgtggggggcgggtgtcttcttctattttctgttgctgtaatatagaatatctgagactagataactaacagagaacagaagtttggttcgtggctctggaggctgaagaacactgctggcacctactaagcacctggtgagggtttcctgatgtgaggcagagcaggtgtacagatgccagtctctgtggggtccccaatcctcaggaccaaagacggatctccaagtgctagtaacatgtgaagggtgagcagtaagttcccagcccactgactgctggaaggacaaccgtggataggggaggtccctgaaaccaaaggccagccatcttgattatgttccataacctatgtgcatcaagagtttgacataaaaagaaggtgtattcaagggggaggtcacccgcaaaggagcggctgggataaaactccaggcgagtctgctaaccgcacttcacctctttcctcaggaatcattttggtggccatgaatccttacaaacagctaccaatatacggggatgccatcatccacgcctacagcggacagaacatgggtgacatggacccacacatctttgcggttgcagaggaggcctacaagcagatggccaggtagtttgctgccagaccggccttcctcggctcttcctctctctgcctctactctctctgcctctgctcagccctcacagtgaaaggaagctgttttgagctcagaagtcaggtctgtgtttccctgcagcccgtttggctgggggaggacctagtgactctgcagcgtgagatgtctgtggtttgtggtctggttttgatccagtttaaggaggcagcctcactgccagctaagcacaggttctagccacaggtttggattttaacctggtgccctcacctcgcttttgcatgaccctgcagattttgctactggacttttacaaaaatcctcttgcaacaaaagcactgggttcacacttcaagcatcaccttggtacccacagggcagcctgtgatatccatgcctttccacagtaacctaacccctggcatatgcagtaggctaaagagagagctgggctttgggcccagatcttcatgattctaggtgtaagttatttctctcatgactgtcctcttgtcattctattgcccttgtctgtaggatgctggagaataaaaacaccatcctaaatttgtcaaaaactttacagcttgcaaaagaattctcacacccagcggtctccttcaggttttgccacactcctacaaagttcactgtactgctatctttcttcccatcttgcataagaaactgaggcatgggctcaggacttgcctcataattctgggtatagcgactgaatagtcttcatctgtgaggcagactctggcaggctcatttatgcgcaagggagccatagtgatgcagtaaacaagacatggtttaacagggaagcctaatgggcaacctgaggctaaatttcacttctttcaagtcatcagggactgaatgatgcctgcccccatcccttaagggagacccatagcctcagggtcaagctgtctcctccataccctacttcacacggactaagagaagggactgtcctccagatgatagagcccctacagagcagcattgctcgtgggacatacccacatggccagataaggctggcctaccctttgaccatgccagtagctcagcctctcacaatggggtcacgttcccaagaaggcaaaaaggatggatgtctgagatgcagtaagattgctcccaaccttagcacatcctacttctgggactttctggcttctgaagacctcccagaaacccctgccggacattctgatggccatcatctgaagtgacagtttgaccatcatcggtgtgaggccaatggaactgcagggctatgtcagtttccagcttgaatccgtgtcactgcgatgaatggactgaagataaaatgggctcgtggtggcctggcttgatgatggactgagccatctgcctttcttgagcgactcttgtccgcaacctttctagggtcttcctttcctcctttttgagaagaaagaactggaccagggactctagcatcaccacaggagactatgtactgtgacctggggccaattttcatgacaaagaatcccagactcatacaactgtaaaattgttaagtgtgccataggacttttgtgaggcataacagaggcataacaaatgtgaagtgttcacccagcgtctaccacctaagtggtgccgatcccacgtcagcagtatactgccatattcctatggcttgaaaagcttacagcattatttttaaaatatcttcattatgtaacagtgtgtaggcttatagaacacatatgtccccaaatatattttgaatcgttgctcttaaaataatatcagtaggatgtgcagaagttgctactggggcttgaggaagctgtcctgagaacctctttggaaagctagtctgagcctggccaattccggggcaattcagtctatctcctgtaagcttggctctttgcacctaagtttacactttgtctaagcagcgtgtttgatgctgaggccctgctctcctcctgggaggctgaactcccagaccttcgagaaacagagggcaggcacagagcccctggtgtgtgggttccagataacaacttcttacaggccatgagatccattccctgggtcaggaacatagccattatgacacgaagaaaactcatgggaagtctgcacaggtttcctgtgtcttcccaccatggcttctccccttggctgatcttgctctgaatctcctcagtgtggtctatcctagtcatggttttgactgtaaagccacacccttgtagtagttgataaccttggccattatcttggggacctcaaaacaaagggacaaaggtcagagcaggaaacactgtgtgttctctgtagccacaaatttttaaaagctagaaggaagtccattgaatatttggacccctggggcagtttgctaacatcccattttctaaaatagacatacatacatacatacatacatacatacatacatacatgattatagatagagagagagataaaaggtagatagatatatagattagatagatagatagatagatataaggtagttagatagatatatagattagatagatagatagatagatagatagatagatagataaaaggtagttagatagatgatagataaatagattagatagatagatagatagatacatacatacatacatacatacataggtacaaagatacatggatagatagataataggttggtagataaatacatagatacatagatgatagataggtaaatagatggcagattagatagatagatagaaggtaggtagattgattgatagataaatagatagatgatagattaggtagctagataaatagatagatgatagattagatagatagatgatagattagatagatagatagatagatagatagatagatagatagatgatagattagatagatagaaggtagatagataggtaaatagatgatagattagaaagaaagaaagaaagaaagaaagaaagaaagaaagaaagaaagagagagagagagataagatagatgatagacaaatgatacagccttttgttttgttgttgttgtcattgttgccattgtcctttttgttcctctgtttgtttgttctaagacaaggtctcttgtagcccaggttggcctctaatatcctacatagctgaggatgaccttgaacttcaaattctcctgcctccacttcctcagtgcatcaccatgcctggcttatggagaactgagggtcaaacccagggcttcatgcatggtaggaaatcaccatactggccaaaccacctctctctacctcctactctcatcctcttcaggaacaggtcttgatatgttgcctttttagtggagagaagttaagctttcttagtacatctcagtgcatctctcatgtgttgcttttaggaacaatagaaatcagtccataatcgtgagtggagaatcaggagccgggaagactgtctctgcacgctatgccatgaggtacttcgctaccgtcagcaaatcgagcagcaatgcccatgtggaggacaaagtcttggcatccaatcccataactgaggtaggcacagtacaactgaagaaggagatgctgagggctggaggtgcaggggggtgggggcggggagggaggtggtggctctgggcatgtagctatgttgttgatgagacttcttcccttaaagacccaaggaatgagggtggcaagaacagggatacaagttctgtgtgtgcatgatgtcactcacatacatacatacttttaaaagaatcgtggatgtgggaaggcacattcagtccgtgacagcaagatacatacgtttccatattgcaagtagaagacatgaaaaagtaagctaacttttacagcattctacagatagcagaaatggaccccagggctgtgaagcccagaatccatgctccttcagactcaggagaaccaggctgctcttctccagctccaagcttctcccctaacttgcccagcatccttgagtgacataggatgtcactggtcaacactgaaccttgtgtgttctaggctgttggaaatgccaagaccacccgcaatgacaacagcagtcggtttgggaaatacacagagatcagctttgatgagagaaaccagatcattggcgccaatatgagaacttacctcctggagaagtccagagttgtctttcaggtgagaatggaggtattaaactggggctggagagatggctcagcggttagaagcactgcctgcatctctacaggtcatgagttcaattcccagcacctcgtggtggctcacaactatctgtggtgagatctgatgccctcttctagtgtgcctgaagagaacaacagcgtactcacatacatacataagtaaataaaactttttacaaaataatttttaaaaagccttaaacctccttgtccttagctccaaatactcagactcctgggacacctgcggcatctgcagccagaaggatccagtctggcaggctttcctgtcctctttggggtctttatctgttctttctttcaaaagcaaaagttgatgtatagatgtggcctcgtgagaactgagaataaaggctactgtttttggattggggagaaaagaaaacccttatagtttaaaaatctgccgtatctttctcatacatgaacactgaagcaggcagggccgccaacctgactatcctgttggtgagaaaggggattagtactggggtggaggtgggaggtgggagggtgaaaggcttttctgtgaataaaatggagacacttcttaaaacgcattagccagagcaacaggaaaccttgaacagcccaatgatacctcagaactttctgcttatacaaattactccatgcctttgcacagaatatttccatgtaataatgttttcctgggctgtctacttgaaggtcatctctggagcccagttcttgctcagtgacaaggatagccagctgtgagctggccacaggtgtcataggtgtccatctcaggaaccaaccatccagactggtatctaggggcctctagttggaaccctggcattttcattggtaaagggtttgggtaatttgagatttttttttttacagtcagaaaatgaacggaattaccacatcttctaccagctttgtgcatccgcacagcagtcagaatttaaacaccttaaactgggtacgtggttgaaggcacatgaaagtctctttttctgaaggggtttcaattcttagttaatttcttccttattatagcataactaaaaagcaaaaaacaaaaacaaaaaagcaactgactttgtcagctgggtgtgcacctttagtcccagcacttaggaggcagaggcaggcagatttctggacccaaggccagcctggtctacagagtgagttctaggacagccaaggctacacagaggaaaccctatcttgaaaaaacaaatgaacaaacaaaaaaccaaactatgttgtctaaaaacataggatggtctttagaccctgaaatgtatgcattaagaaaatcaacttggctggctgtggcaccatacattgatggtctcaaaaactcagaaaacagaggcaggaaagtcaccacaagttcaagacgaacctggtctacttagctatttataggttacctaggactacataatgaaactctgtctgaaagaaagagagtgaggtgggggagggggagggagaatgggctgggctatctcagtccagtgcctggctagcatgcatgaagccccagttcattccccagccctgcaagtaccaagcgtgctgcacacgcctagaatcccaggagtgttaggaactaaaaccagagctttagggtcagccctgcttttaaggccctgcttcactgtcaaaggaggaaccctgaatgagggctttgttttgctgactctcagcttcagtttctatgatatccttgtaaagtgtttaatagagcccattaagtgtgaacttccttccctgttccttccttctctccacccccatctctctccctctcttgggaaggattttatgatgtagctcaggctagccttgaacttagtactgggatgcaggggaaagctaccctgcctggctttttcttatttctgataaccatgtgtgtccgatttctgagttgtggaaggaattaattaattgtccttttgattccagggagtgcggaagagttcaactacacaagaatgggaggtaacactgtcattgaaggtgtcaatgacagagctgacatggtggagacccagaagaccttcacactactgggtaagagacaccaaggtaatggtacatactctgagaacataagagcatgatttggtggcacggaggggtggttatgaacacgtcggctgcccttccagaagacccagtttgattcccagcactgcgtgggcagctcacagccacctctaactccagtaacaagaaaagagatttgtcttctgaactctgagggcaccaggcactcacgggttcatacacacagagaccaacacacatacacataaaacaaacacagttttaaaataaagatcgtgattggccccaggcgctgacttggctctacccagacccagcccggcacataagcacagagtcatagacacagttcccagtagtgtacagagaaacatctcctagggctagtaatggtgagagccactactgggctgtgtgaggtgtcagacgcctcaggtagtgactgggatggaatctgctgtttccaacaaaacagcttctgtccaagcctgtgcagacctgctcgagcctgtgagtggctctctcctccattttctgggcactgccatgttagacacagatagagattgtcgcctgtttctgccgttctgcagccctttctgtcttgcaatgatcactgtcactagcagttgttgtgacccttggtctctgccaacaagtccatacccagactccagggatgggacctggcacactcagtccctggtttctgattccagccaacgtggtattagagtgtctcaggacagacggtgactcgctgaggtttaaaatttgttcacatacagtgtgggtgagtgtcttagtcagggtttctattcctgcacaaacatcacgaccaagaagcaagttggagaggaaagggtttattcagcttacacttccacattgctatttatcaccaaaggaagtcaggactggaactcaagcaggtcaggaagcaggagctgatgcagaggccatggagggatgttctttactggcttgcttcccctggcttgctcagcctgctctcttatagaacccaggactaccaggccagggatagcaccgcccacaatgggccctcccctgctgatcaccaactgagaaaatgccccacagctggatctcatggaggcacttcccgaactgaagctcctttctctgtgataactccagctgtgtcaagttgacacacaaaaccagccagaacagtgaggctacacgttttttgactctgaaaggcctggtggtcaagagacttggttaaagatcacagaaggctagtggagtgcccctggttctgtggtttcctttgcctttctcagtcacttatctgccatttgtcacatcagccacctgctttcttgccaggctcagctgtcactcaactcccagattcaacagcttcatacgaactgctctatgtacttttggtctggtatctttcatcgttgagacagagaaaatttgaatagtattgagatgacttagaattctgcctcccaggtgacccagaaccccaggtttcctccatggaaagcttatgtggcaactactgttctctggcactcggggcctgctggcttgctggacagcaagggcggtgctagcctccattctgttctccacccagcatggaccagagggacatgtgatggacagtggtgggaggaggccccagcatctcccccatgttcacaggagtgccgcaaacacgcatggctgcatcctgatcagcacagcccagtttgcagctggcatccggacgcgcagccctcctagctgctggcttagtttattttcggcaccaggaaatgggccagttccctctgttccacacgcatcagtcaagatcccagcggtattatgtgacaaagtcaaaacagggttagggagagaggggggggggagagtttatttatgaccagacccacacagagattgtgaaggaggtcagacaagccaagagggacagcagggacccaggactagtgggagaactgttcttgaattcttcctgcttgttgttctatgagcctgaaaggagattgaggtaaactcagtgctggtccaggaacagatatccctgtctgaggtcacactgcacagaggagctggggaggacatgctcagagcatcctctgctctgcctactgctcatccccaccgcccccctcctctttcccctctgccgcctgcttctcctgctcttcctattggtcaccagcatcttcgttgccatagttaccacactgtcttcattgtcgtggttcttgttgtcatcttcccccacttgtcccttttttctcccaccctgcctccctttctctccttccaaggctctcctttaatcagaccctgcagagacccaaggtcacaagagcccattgccttgatccacagtgattggcctgtggggactggggagacaaatgaaacccttttgtcatctcaccttaagaaggattctagtagcttatgagcaaagagaaaaggaaatcttttaaatgaagtatataaaatacaccagtgcctagtctcacttaaaatgggtgcttaacaggagttctttctttgttattgttttgttctgggttttgttcttttcctttgagacggggtcttatgtagcccagtttggccttaaacttgatgcataggatgatcttgaacttctagttctcctgcccccacctcctgaatgcctcagttacagaaatgctccactatgcccggtcagtgtgatactgggaatcaagcccagggtcccctgcatgccaggcaagcactctaccaactgagcaacaccctcagccccagatactagttgagctttccagcagccaaggaaaaggaaatactccctgtaaccccccccccannnnnnnnnnnnnnnnnnnnncccccccccccccgcccagcagtattcttatctaggagaggaactgtgaagaactaagtccacttcacacccctgtgccatgaaacctcagttttacacccctgtcccacaaaaagcccactccaaactcttgtcccgtgacaagctcccttcacacacctgttccatgaaatctcacttcacacccctatcccaaaaaagctcacttcacactcctgtcccaagaaaagcctgcttcacgcccctgccccaactcctggcactgcaactggagagtcttagaagcctctaggtgctgtctagcaatgccttgacttggggaatgtttactttccaggattcaagaaagattttcaaatggatgtttttaagatcctagctgccatcctgcacctgggcaatgtgcaggtcaccacggtgggcaacgagaggtcttcagtcagtgtaagattcatgttcgctttgcgcttcctgggtgtgaaggtcagtggggcacagctcatggctcactggccaccacggttgagaccagccatgcttggacctgctagacagactggtttagcaggaacgaggaagaaagctttccaggggttgtcttattcccttgtcacagtacatgtgtgccatgagtgtgtgtgtgcatgagtgtgtgcatgagtgtgtgtgtgtgtgcgtgtgcgcgcgcgtatgtgcacacacgtgtgtgttgggggctctgctatatgttcttttattcaacaacatctatggagcctatcatgtgccagggatagctgtaagctctgtgaaacatcatcagaccaaacaggaagtcctgacctcacaggaggtggggtctggagaaagtaggaagtttacctaccataggctgagggtaggcagtgggtctcactcctctccacagctctcctgctctccagggtaccaggtgggctggggtctacttcttgccctcctccaactcaaaactgcccctccctccacccgtgtccaggccttgcagactttgctggtcctcagatgactgggatattgggagagctgagtataatgtgattgcagctctgatcttttcctgccaaactctcatagagtgaacatggttcccacccagccaccctgagcactgttgcaccagggttgccattgcagcagaatcttagaaaggaaagaattctaagactctcttttttaattattaaattttattttatgtgcatgagtgctttgtctatgtatatacctgtgcaccccttgcatgcctgctgaccaggaggccggtagagagtgtcagagcccctggaactggaattacaggagtggtgggctgctttgtgggccctgatcctcagatctccattccccccccccccccgaagagcagccagtgctcttaactgctgagtccttctctccaccccagctaagactttagaaaaaatggagccctataattattgaccctggctttggtaaggcatacaattcatttatttcgggagcttagaatgtcagacaaactgaatttcaggtgaagcactcctcttaaaagtccactggctgccgcttctttgtatccccgtcctagcatagaagcccctccaactcaatctttttactttaggtgttttcgtcctttcttagacagaaaggctctgccaatcccttccccagagagggtgtcaggcggggccagaaggaagggctgtgcccgttgtggcagcagcaggaagggtgaggggaagagcaaggaggaggtggggccgcatggggggttacattttttccctccactttctgagcatttaaagagcagtcacttgtgatagatacctcctgtcttgggaggaaggatggtgcgaagtcacatggaaccacgctccccagccaagtggcaagagcgggaggcagtgcatgctggctaaggcaaacagcatcccctacccctacctctgcagaccagtgtggcatctctcatgtacagactcaagaagagaaacgtcattttgtatattcaggagactcctccatcagctctgatgtcagctgagaagttagctcaggctaggaactcctcccaggtctgtctggtaacaatcctttccttagatggatcacctaagggaatcatggccacattagttggccacagggttggtgtacaatatgctgacagcatatggctggagaagtcaaagaagtgtggaggagggggtgcggttgtatggatggattggagcaggcctgctggcttctacagccagagtgaagagactcaaaaagacacagccaggcctctaggcatcactgcagcagggagggtgtcaccacagcctcctgctctactccagccttagttccaatcacaaggcctgaatatctcacacagtcttggacagacttggccagatggggcggtattaactttggatgcctgatggggcttgtgtttgtttcttgaaggaggatgacagtcacctgaaggtgttctgtgagctcttgggcctggagaccagcaaagtggctcagtggctgtgcaacagaaaaattgtgacctcctcggaaactgtggtaaagcccatgaccaggcctcaggccatcaacgccagggatgcgctggccaaaaagatctacgctcacctgttcgacttcattgtcgagcaaatcaaccaggcgttgcacttctcaggcaagcagcacacttttattggtgttttggacatttatgggtaagattctcttctgcctgcctgcctttcctcgtttaaatgtcaaacgccctgttgtttttaagttgcacccttccacttgtcttgcttgttttgaagatgattttatttttctttgctgaatggagagatgttaaatatagctcctgggtcatggtgtcctttctgtagagtgtgcgttgaataaatgacaaactgggactagggagatttcttagccagcaaaatgcctgctatataaacatttaagtttggatcccgtcattcatgtaaaaagccaggcagggcacaggggaggcagaggatggccagcatagctgacctgatgggctctaagttcaactaaagaccctgtctcaaagcgttaggctgagaataatagtgagagatacccaacatcgacccctgccttccatgtgcgtacgtgtatggccacatacagcagcacacgtatacaataaatgctaactaataatggctgccaaactccattgtgtgacagacaggtcctgtggtaagtggcttcttggtcttcaagccacctggaagcacccccatgttaggtaacaaccaaagcttggaagaattaagctgttcacagcaggtcccttggcagggggatgtgagccatgtcagtcccctacaggtccctgaggtactgagccctgtcataccctcctgttccccaggggcagtgccagttatggctgcttggcgtcctcccagtctgcctggcctgctgtctcctgccctcacacacctgtgttcctgtcctttcctgagagataagggcttgggtcgccccaccccttctttaattgtcccaccccttcttcaaacagcgcaaagcttgggccactttggagtttggtttcatctttctctctgccctgtcctgcttttctgatccggggtccagctcctgttgaaggtgcttgctgaaggcagggtggaagctggcatggaggtgataccaggtggctttctagttgtcagaaacccccctctcctgtccctgttcctgccaggctcttaggactgcactggcttctccacaggacactgggaagattatcccagcaaagacttgatgctttccgtcagttaggggctcttccccacatggagggaggggactgggccttcacatggagggagggacagtccatcaacttttcacccaggtagagagccagctgttccaatacctgttccagatgttgaggggagatactgaagggagtgactgtttaatatagattttaactgattactcatggctcgcaagaaaacctagcaacagtttgaaaatactaatacaggactggattaggctagtaaattatttaccttatcttatcccaagaaataatttgagtaaccagtaaaaaattgaataaaattggaaaataatagaatagcctggcttaaaaatcttacattgaggtggggagtgtttgctgtatcttccagaacttgcctttaaaaacggtggacttcttagcttaggaatatatttcttcattttttttaatgatttatttttatagatatgtgtatgtatgtgtgtacacgtccatttgtgcctatgtgggtgtagtacccatagagtccagcagagggtatcctattcctggcactggagttacaggcaactgtgagccactcaacatgggtactgggaactgaactctgtccctctgcatgaacagtacgccctgttaactacagagccacttgtttatacttttacctaacaaataattacttgccaggcactgtgtgatggaaggccttctgggacgtcattttactagtgaaggaggcaaagaagtcagggtgattactgtgagagaaataatgtgtgcacttgtgtgcacgcatgtgtacatgagtgtacgtgtgttcgtgtgtgtgtgtgtgtgtgtgtgtgtgtgtgtgagcgcgcgctcgtgtgagtgtgtgcgtgagtattaggatgggaaagggaattcagatccacagagtttgagaccactgtaatgaagaacttgggtcttgcagctaagcagcctattatatgataaaagtgtttacacctttaaaaacttctcagagtccattaaattttctagttggaaaatgatactcttgcgtagcggttattaaaatggtgcatgaattcatagctcccctctaagtggcagatctttgtggcccagggtgaatcacttcctagcactctggcctctgtgttaatctgggtcctaacatgtattgtaccttctgagggaactgagctcagcttaacctggacatgacaatggctgctatgaaaagttagcatcctttaacacagataaaactgcagctgggagctttgaggtccaaagtacaaagtgaaggaaaatttttatttttgatgtcccagactatcctgtgtttatgttctctggaccagggttgaaaatgtctggacctgaggttagacctctgggctagcctctccagcactctaatggcacgttttcagccactgaggacctctcccgcagggctctcaggacagttagatggaaaaagtcaccaagccatcttgagccttaagccctggtcttggtgcaaaccacagtcacagacagcagcgcctctagcatcttaagccataggtccctgggttttaaacttcagctcacagtacctacaaaggatcattgtttgacagtgtgccctactgtgggaaaccctgctccttttggccctgacctggtccctcccaggtccaaaccggcttccatttctggtgcgtgaatgatacaaagaatggtgaacagtcaccctggagctggagctgtccgggaacctatggcagggcagtgaccccataggaccagagccacaagggacaaagccttgggcatgaagaggagggtggaagatggggatacaagctgccttttgggtaccattgactgtcccctgggtctcaccatggcctcttggactctgacccttcctgaaacgatgaccttatattaaccctccacctgaggcagagttagagcaaagagaagtgaggcacacaaaggctggcatttctaaaggcttcctcctccggacaggatgctcgtccccactccccctcccccatccaccgccagaggagtcagtgtacactgtagtaaaatgtacactgcagcctcctcgtgagaatcagctaatgtgaaatcctggactaggcccacgtatagccacagctggcaagagctaagcgaggctgatccttaagacaatcctgtttgtcacaggccccaaggggctcactgctgtgcagtaaccagccagtcccccatctttgtattgtgtctgactgctccaggctcttgagtttacaagtcagtcgcctgggtaaccctagagacagctattaaagcctaaaggacagacagggatgtgtgtggcttcctgctgggctgaagaactctgaaagccagcctggggaaaggcagagtcgtcagagagagaggagagtgttctcctattgaaagctcaagcgctactgccaatcaggctcagtgctatgccctgagaaatggagccaacccctcagccattttctgtcctgtagagggaggacagtaatgctgacaccagtgttacatggattaatcattgtgccgcttgcttgcgacaggtctactgtaatgcctggtttggggagggaatcatgtacagtcagattcgatgcaggagacaaccagtggggaaaagggtagtctgtcaactgactgccagcttagaaggaaccagcaagcagctttgaagtagtttaaacttgccgaaaacatagcaaacctcttaagctatggaatcgttaaacacacacacacacacacacacacacacacacacacacacacgtatgcattagttacaatgagcattaggtcctgggcttgctttcattttaatttgttcaactgtgtttcagttttgagacctttgatgtaaacagctttgaacagttctgcatcaattacgctaatgaaaaactacagcagcagtttaacctggtaggtgactttttgtcttcctggggccgatgctcagccctctgcgtgcacgacttgggcatgagccttttctggttcctcattcaggaatccaagcatgcctgggttaatagataaaaaaaatgttcctgatagctagagctatacattgagttgctatgccgctctgtggctatatcttgaaactgcaccgccatctttgacttccgttttggaacaacttgtgacactttcctccccatctatcacctgtttccttcatcctccaggaggagcctccttgaagccctgaattctagtataggttttgcacactgcctacatagccaacaacctctgtgactgccctgccctggttgggctgatccaggctgtggaggctgcttttgtccccagagagagagcagcagtggcccacagccactgggactcaggcagctgtgttggtggtgacacttttttggtccaggcctgacctagtggaaatggagaatccactcaggatggtgtcggggtgacagccagacccactggagacctcttagtggctttgacctggggagggggatgggcagtgttccagggtcttcctgatcacagagcggaccttcatctgcaccttccaggcttgtatcaagcccttcatgtctctctttgacgttgtctaatgtccaccttatctctgggctccccagcacgtctttaaacttgagcaagaggaatacatgaaagaggacatcccctggactctgatagacttctatgacaaccagcctgttattgacctgatcgaggcaaaaatgggcattttggagttgctggatgaagaatgcttggtaactgtcagaataactggcttctttttcagcgtctgagtagctacagatgcacacaccgccaatcggtccttttggagttgtatatgaaaaaccagatgtcttactcatttggttggatattaaatctgagacactcatgtggaccctgaaccctgggggcatgacactcctgcgaatggtggagggggacgtttattacatgtgaatgaataaaagacatagggaaaaaggtaatctggaggctcctgggtatggagaggggagaatttattatagatatgcgggagagcacagccagaggcaagcacatctgggagagtccagagtggacctgacccagagctgggccgtgtaaggagcggggtaggggaagagagaggggcgagcaggggaaccaggtactgcaagccaggaggccccaaaggtacaaagagagcaggtaaccaaaatggttagattatatagataagggcaacccatcctcctagggtagggggcagggtcggccatccaggagggccctggaacaggtagggactgagggatgcagagtgaacctagcagccaggtcttctttgctatgttaaataggcaccccagccgtttgtctgggatttgaaatgttaacagaagatataagggaaagaacaaccagaggcatccagaagggtccagactgaactgggacatgagaggagagatggggcaagagaggaaaagaagtaggggcagagaggagtcaagaactgagagaccaaaaggccatgtagccaaaagggctggattatatggaaagaacagctgggggaaggcagtgaaactccggagatggagagatggagagtatggggcgggtatgccagccaggatgaccctgcaacaggtactagtgagcagggactgggggcaactgatggcttggaaatgccaaacaggcacctcagttagccatttgtcctggtaccatgcacaacccccagggtgacgtaatcttcaaggccagcatgcagacagatgtatagggcatgcagtgaatggctccaccctgtttagtgtgagtcagccagagggggagggagtgtcaacaccatgtgattccagagaacctctaggagtttggctaacttgtacctttgggaggagtgtcacttaaaggtgggtcnnnnnnnnnnnnnnnnnnnnnnnnnnnnnnnnnnnnnnnnnnnnnnnnnnnnnnnnnnnnnnnnnnnnnnnnnnnnnnnnnnnnnnnnnnnnnnnnnnnnnnnnnnnnnnnnnnnnnnnnnnnnnnnnnnnnnnnnnnnnnnnnnnnnnnnnnnnnnnnnnnnnnnnnnnnnnnnnnnnnnnnnnnnnnnnnnnnnnnnnnnnnnnnnnnnnnnnnnnnnnnnnnnnnnnnnnnnnnnnnnnnnnnnnnnnnnnnnnnnnnnnnnnnnnnnnnnnnnnnnnnnnnnnnnnnnnnnnnnnnnnnnnnnnnnnnnnnnnnnnnnnnnnnnnnnnnnnnnnnnnnnnnnnnnnnnnnnnnnnnnnnnnnnnnnnnnnnnnnnnnnnnnnnnnnnnnnnnnnnnnnnnnnnnnnnnnnnnnnnnnnnnnnnnnnnnnnnnnnnnnnnnnnnnnnnnnnnnnnnnnnnnnnnnnnnnnnnnnnnnnnnnnnnnnnnnnnnnnnnnnnnnnnnnnnnnnnnnnnnnnnnnnnnnnnnnnnnnnnnnnnnnnnnnnnnnnnnnnnnnnnnnnnnnnnnnnnnnnnnnnnnnnnnnnnnnnnnnnnnnnnnnnnnnnnnnnnnnnnnnnnnnnnnnnnnnnnnnnnnnnnnnnnnnnnnnnnnnnnnnnnnnnnnnnnnnnnnnnnnnnnnntctacaataaaaaccttcccctcaaccacaccttggagcacatcacgtcctcatttttatacacaataaaactgccaattctctttgggtccttcctggaattctcggttccatggttcttcctgatcaccttttccagcaccacctatgcaccaactcttgcaggcatcaagccagtgttctagaatgttctagaggcaggagtattgaggttaaggtagacttcacatctttgtaagtcctgtaggtgacctggaagtcactgagccacagtggagtatgggactcactctgtttgggttgagtttaactagtggtgtttaaatgccagcattagaaacaggtttttcaaggagcttagctggaggaagtatgaccttggttatgggaggcagaaaaaccaaataaaatctattttccctgagatgggggtagggaagacacaaacctggtgttgtccttcctgttctgctgggaatggagtcaggctcccatcccattcctctttccttgaactttgaagctcctgtgagaagaagaataaaatactgcctattctagtttatgcaagtcttcaatcccaagcattgacaatggtatagccatttaactactgtgataaatacttcatatatttgttcataataaaaaaataactatgtataaagattaataaagccaaagatacatgaatgtttagaattgcttagagcagtggttctcaacctgtggggtgtgagcctttggggggagttgaacaaccctttcacaagagttgcctaaagccattggaaaacacaaatgtttacactacaattcataacaaaagaacaattacagttttaaagtagcaacaaaagtaattttatgatcagcggctaccacaacatgaataactgtattaaagggtcaaaacattaggaaggttgagaaacaacctggaggaaggcctagaggaagaaggtcctctgacttgcagtggccccctgaggcagcagatgaccttggtgcccccaaatcagcttcctccctccctctggacatctttcatctcgttcccatacttgagatttcccttgctttctcttccagttgcctcatggcaccgatgaaaactggcttcaaaagctgtataacaattttgtcaacaagaactcgttattcgagaagcctagaatgtcaaactcatccttcatcatccaacattttgctgacaaggtacagtgacgtcttgaccactgtgccacacccaggtcagaactcttctggtgtggttggattcaagtcccactgaggggagctgggaagacaactggtcagtaaggtgtttggcttacaagcatgaggacctgcgttcagtctctcttcagacaaaccaggcatggtgacacacatctgtaatccattaggggaagatgttttactgcaggtaaaagagggaaaaagtccagaagcatctggaagagtccagagcagagaaggaagcagactgggcatgcccaggactaacactgagagaagggagaacagcaggagggactagtggatagacagcaagaaaatagcacatgcgggggggggggggggatgcacgactagtgagatagcaagatagaagagaagaactaaaagagcaggactagaagagaagagcaggttataaaccaagtatctgggagatacttcctggagggatatgtcctagaagtatctcctgtgaactggagcaggcctgtgggtttgtgtcggaagctccaacaccacagaacaggtaaactgaggcaattgatcgctcagcagacttttctctgagggaacaaaacttgactcccaatttcctgagcaatgctggcttatatctaaacaccagagatctttctgtagtccagattgagttcatttctggtagaattcgtgcttagtgcatctaaagccctgggagtgatcccatatcctacaaagaaaagaaggggagagaagaaacaggcttgtacctgatgcttgtgctctggcctctggggtaacgggcctctctctctctctgcgcaggtggagtaccaatgtgaagggttcctggagaagaacagagacactgtctatgacatgctggtggagatcctcagagcaagcaaggtcagcagggtccccagggaggggtacaggctgctgctcattgtgtagctcacacaaggaagggtagagttggagagaggggagctactgagtaacagcagcacctccaagtggtgttttcatttccttctttttcccagttgaataaaattccagtatatccatgcactacattttatttgttttagaactgagggtaaagtccgtgttagcatctgaaaacactgttcagttgtacacacgcagctgacagaaaggggacagctaacgcagccagccggccaggaaagcgcagttcacagttggctccttcgctgactcacaggagtatgggactagctgtgggtcagtccctcacttctggggacacagcagtgaccacacctgatgaacaagtcttcccaggggcacccaaattttagtgacaggcatgtctctttgcacatacacaagcagtgtgagagtctcacgacactcaaagaaatccaaaatgaaggagctggggcgatgtcagtgagtgaaatggctgcctcacaagcaagaggacttaggtttgatcttcagcacccatgtcaaacaaaacacaaaacaaaacaacaacaacaacaacaattttgttaaatctcacttgcctgtagccctggcactgaggaggcagagacaggcagagatctggggcttgctggccagctggagtagccaagttgctaagttccagaggtttaatgagagatcccatctcaaaatataaggcaatgaatgactgaagacacacccagtgtcaatacacacacacacaccaacacacacatacaagaaaggaagaaagaaaggaagaaagaaagaaagaaagaaagaaagaaagaaagaaagaaagaaagaaagaaagaaagaaagaaagaaaaagaaaggagggagggagggagggaggcaggcaggcaggcaggcaggcaggcaggaaggaaggaaggaaatgaaaccaaggataaagagtgtggctttggacatcaggttctagactccactgcatggtgtgatgaacgttatctctaaatgaatgccttgtagccgttttctttcccacttcaaacctttcctagtaaaaactttgagaagaaggtacttcatagctaggccttcattttataatcatttggtctacatttatttccctctcagaagatccagtctcctacttaaagtgctcacatcctttgacagttccctaaaggagcccaggcaatagccctgatgagtatgaacaaatgcagcgctcagtaaggcggctcgcaggggagcatccctgttgaaacttggtgaattagttgacttccttggctggttacttagccccaagcttaccccagggtcctgcctggaagatgtcttacagactgagtctgtctcctgcgccgccaacagttgggaactccagactcagtcactgcctgagggcacagggccctgctttgaggccgttagccactttaaaagaatgaagagtaacagaagacagacacttgacacaactgatgcacagcagagtatagatgcctcagaagaggagcaaataaaagtgggagaacagaggcaggaccaaggccagcctgggctttacattcataacaaggtgtaggtcagccagggctatacagtgacaccctgcctcaaaacccaaaggggtctgagaagctagctctgtcagtaagtgcttgccatacaataatgagagtttgaatctgagacccagaacccttatgcaaaagccaggcacagtggtacacacacacaaccatagcaatttgggggagacagaaacagggattttactggttcctgtatcctgatttgggtaagttccaactccctgtgagaggcccttgtctcaaaaataaggtagacagtgttcttgaggtgcaacacctacgaccatcttttggcttccctacgcatgttttgcatgtatacaagcatgcaacacacacatgaacacacacacacactatacataaaatcatccgcatatacacatagatatggggatatgggttcaacactgtaagcagggtgtggccagaagacactctaatgggccttgatttataagtagggcttggatctgcagagagaggttgctggactctgaagctgagccaaagggcccagtagggacagaagatgtcttctcttctgccagatggagcagtgcatgcacacagacacttgcacagctgtcctctctcttccagtcccaggaagccatgggcatcaccatccaggaggccctccctatacaatggtgttctggctgtagaggtagctggggccatcacctgaaccctctcattgagatagccgtcatgactgtgtatttggtctgtgctggtggggatactaaaacccaccctgttcccttccagtttcatctctgtgccgccttttttcaagaaagccctgttccgtcttctccctttggggcgatgatcacagttaaatctgcaaagcaggtcatcaagccgaacaccaagcacttccggaccactgttgggaacaaggtacacaggagggaggtgggaggtgggaggtggnnnnnnnnnnnnnnnnnnnnnnnnnnnnnnnnnnnnnnnggaggtggtcaccagtaaggccaggttccggggagccagactgtgggacccacagcccaggcctggcttcagacaacaggcctcttccaaaccatctgttaaactcctaacttcagtttagcacatcccagtgccccctccctacccatgaatagtcatatggtatattagttttctgctgccggggaaccttggtcaggtagggtgcatctgtaacccacagtcatagtctgccctgacagatgcttgtgtgaagttacctcttcttttgaaagaatgtttaaaacttttcttcatgtgtataggtgtgtgtgtatgtgtcagggtggagtgtacacaggtactcagaggccagcaaagggtgttggatcccttggagttagagtttcaggcatctgcgaaccacccagtgtgggtgctaggaccaagactgaggtccttcagtagagccctgagggctcttaacgactgagccatctctccagccccagagctacctcttctcatctttatttgtcttgcaataagcaatgttgttacacagtaacctctgacctctggccctgcttcctagttccgcagctctctgtacttgctcatggaaaccctcaatgccaccacaccccactacgtccgttgcatcaagccaaatgatgagaaaatgccctttgagtaagtattcctgtcatagaaagtgacatcctaccgtgaccaaaggcaacttaaggaagaaagttctgggctaatggttccagagggagactctaatggtggaggaggtggcgaggcagcaggcaaccagaggaagaagctaagatctcgaatctctgaatctccgttcacatgcaggaagcagagagagctaattggaaatgggccaaggctacagactctcaaagctctcccctggtccctccccaacacacacacagagagacacacactgtgtgcttcctccagcaagactccaacttctaaaggttccataaccttcccaaacaggttacaattggggactaagtcgagtctggcagtggtggtgcacgcctttaatcctagtgcttgaaaggcagaggcaagaggatctctgagtttgagatgcctggtttacagagtgagttccaggacacagagaaaccctgtctcaaaaaaacaaaaaaagaaagagagacagagacagacagacagacagagagagcaagaataaaaccacagcctgtgggagtcttttctcattcaaatcaccaagattctggagttttctgagatctcccatgaactttcccgtttctgagttctttaatgattcaagcagggttgctttttacaaattagcaccacttctctggttagaccacctcatctccagggctgagcttgaaataactgtctgcaagccgaggttagaaacccagaacccaggctccctgcatgtgtaagggagcatgtgtgtctgtgtgtccaccaacagtgttagacctgtgcccacgctactgtagggtacgttgtaaaggccatccctccattggatggggctagaatgttactgccgcacatctttttacctggtcggtacatattttcccccacaaagcagccttttcccaccaccccctttagacctccttcccctacttacctatacccccagcttctagactgtttcacagagaggctatttcagaacattctatccatgcgtctggtgctctgtatgtgtgttgggggtgaagggacaatggggctgaatcctgctgcccaggaacctgaagcccaggccttcctgtgcacatggtctgcatcactccgtagctacgaggccttaacacattataaaattactttaaggtttgactccaagcggattgtccagcagctgcgagcctgtggcgttttagaaacgattcgcatcagtgcccagagctacccttccaggtaggttgttgtaattgagggcacagagaagccactagaggggaccacacccattggtagaaagcttatttggggggaggggactcaagacttttatctgttgcagacttggttgagttaaacaggaactggatgccctttgtgggagatgactgtctgtagcgggcagataccgaaagtaatggctttttctgacattagaaagttgctttacaagatttctgaggaacactgagtttaagtttttgtttacccgataggtggtagtcatccttttgtttccccaaacagagtccagccctagctgagcccaggctgtcctttaagacaccatcaatggcacggccttttagggggtccacttcggaccttgttcaagtgtttgttaagaacagagggtgtagtggcaatatttttgcatgctttgcattttgtaaggtgcaatattgagggagagggacaggtgagaaatacccatctttctttactgtgacaaaaatccccaaggagacaagggagatgtgtttattttggcttatggtagtaaaggttgtagtccattgatggctatttggcactgttgcttctgggaacagcatcatggtaaagggtacatgtggaccacagtggctcacctcactgatggcaggaggcagtcagaggaataagaagtagccaaggacaaagccacacctacagtgagctactgcttccaactcagccctgtatccttcctagtttccaacccctccccaatagcatcaaattcagactccatccttgggcttatccattcattaggccagaaccctcacgattcagtctctttcaatagtctcacctccgaacactgcactaaggacctagccttccacatctgagtctttgggaaataagcaatgtccaaactggacataagcgctgtgtgcatctcagaagctaccagcagctcaggcccccatcctcagctgctgctgctgatcccagctgacttgttagaataggagctgaggagggtcagagggagggaggattggttaaaccatttcatagagaaggtacacatgctgggtggtcttggtggcgacacagagatggtcaccagagcagacttcaccacgccccctgtgagagcagggaataggggccagcacagcctactgcatgaagagcctcctccctgatatacctgcccggttccctccgattttgcaggtggacatacctcgagttctatagtcgctatggcatcctcatgacccagcaggagctgtccctcagtgataagaaggaggtgtgcaaggtggttctgcacaggctcatccaggttggtcttgcctgttgggctctttccagaagtgtgacactcaaacgtatccctttgtgtgctagtaagatagtagcagtcacatcccctgaggtaagatcccttaacagcaggcatctcctgtggagattcaaaccctggagtccacagctatccccccatgatctaataccatcctctgtgggtcagggtcactggacatggtcagatgaggtggtaacccagcagagtggtcaagttgctcagcatgaattgtgattcctgctgaggtgatgagttaggacagaaaggagatgacgagctatgacagtcaggacatggaataggggtgtgaagatggcaagctatgatgcccaggaaatgggaagggggcttcaacccaaaaccaagacagaaaaacaatattcaccttgaagtagaagtttctagattgtgattctgtttttctctgccttgtgcatatgtaataccaatgattttagaatcttttgactctctcaagttgaaaaaaaacaaagtttattttgtagttatatctttcttctcttccaggattctaaccagtaccagtttggtagaaccaaaattttcttcagagcaggacaagtggcttacttagagaaactccgcctggataaactgagacaggattgtattatgatccagaaacacgtgcgaggctggctgcagaggaggaagttcctcagggagagacaggctgccctgacaatccaacggtacttccggggtcagcagacagtgaggtaagggagcgaggaaggaggcactggggttacaccagtgacttcccaggtcaacaaacagtggggtgtgctgaacccgtggagagcaattaggtcatagggctttggctgtcattgtacccacgaggaggagcagccgaggacaaggccccttctcctgatccagggacacaggtgtgagtcagaagtccccaccagtgaccatgaacctggatgtgagatgggcctgtcctgggtgccagctcttcccaggctaggacactttccttttttctacaatataatatagagattatttcatggttgttttacttatatttcttagtcattcataaatctccctcctcatggattcctcctcctccatacattctgaagagaagaattcccttacttccttactttaggcagacgttacatttttcctgtgtgaagccagataataactactgaaggccttaacagttcatgacctctgattcaaattctaccattatagcctaaaaacaggcacattattctgttttccgtagctgtaagaaagagcctgaggcccgactctttataaagaaaagggatttgttcagaccacagttttggagtatgggttgttttggcctctgataatggcctctattgttatgatacagtgtgaccgagaaagtagccagaaacagccacgtggaagagggaccgtgtgcatggggcttcctctgggtatataagtccactgtcttcaggtgtggtggtatgtcctgtaatcctaacactcaggagactaagtcaggagaaggctggatttgaggccaggctgggctgcctaatgaatactaggccagtcaagacttcagagcaaaataggtaagtagataagggctgtaggtgagagtgcttgctgcaggtgtagcaattaagaacagtttgtatccaagcagcatataaaaacagctgggcttgtccacacatgcctgtaaccaggaaggcgagaggacggctggggcttgctggccaccagcctggcttcaggttcagcaagagaccttgtctcaagtgagtaaggcagagagtgagagtggggcatcacattctctggcttccatgtacgcgtgcgccacacacctctgcatatgcaccataaaaaaaaacataaaaagatacattttaagataaaaaggataaaacccactcctccttgcctctgactcatatggagctattcagaggccacgtcaccaagccaccccttacaatcacactacaagcagggtcaaatgtccagcttgtgaactttccggagactcaccagaggccagctccaggttgtaccgctgaggcctgatgggctccgccgcagccgatttgaccttcagatcatagtctgccagctccagatctgcagcttccaacccatcttccacaaatggacagatgagcaaacggggtttgcccaggcactgtctcgtcatcacagtctctgtgggcctgcgctgtgcgcctgtgcacacatgagcacctgggcattaactggcccaagcagacaccatgtaggggatttcacatggctcttcagtgccacactgaggtcagggtagacacagacaggcctgaagttgcatcaggatctgatggtagagatgtaagaacctaagaaccacccacccctgccactgaaaggcgcaacccactctctggttcatggtgaaggctgaggctctggccacccgctcacactgccatctcttcacccaaggaaggccatcactgccactgctttgaaggaggcctgggcggccatcatcctccagaagtattgccgaggctacctggtccgtaacctgtaccagctgatccgtgtggccaccatcaccatccaggcacacaccaggggcttcctagccaggaggcggtaccggaaggtatggagtggacttaggctgctgctcttcactgtttcttcctcagtgcaggggttctggtgagagaggtgtcctcactgtcctgggggtttgcctgagaggttgctttaaaagtctgggatgaaggctcagtgggtcaatgtcaatgatgggagactcctggtctgcactgtgcgagtgctccagggctggctttcccagtgatgaaggacctgcagagagaaacaggaggtctggctgacatttcactgagctccctctccagttgttgcaggagcacaaggcagtgatcctgcagaagtatgcgagggcctggctggcccggcgcagattccagaacatccgcaggttcgtgctcaacattcagctgacttacagggtccagcgcttgcagaagaagctggaggatcaggtaggcatccatatgcgtgtgtgtgtgtgtgtgtgtgtgtgtgtgtgtgtgtgtgtgcgtgtatatgcatgtgtgcatgtgcatctgtgtgtgtgcatgcgtgtgtgtgtgtgtgtgtgtgtgtgtgtgcacgcgcgcatgtgtatgcatgtgtgcatgtgcatctgtgtgcgtgcatgttcatatatgtagggtgtatatgtaagtgcacacacatgtgtgtgcatgtttgaccactctattctttttgaagcaagaactgtcagtcaaacccagagctcattcacattgccagaaacccctactaggcagctttctctaggaaccccctggctctaccttccaaggctggaattacaggcatgccaccatgcccacttggcatttttgtggattctggaaacccaaagcactttgactttggaggcagccctcttccccctgcctttacctgccttctgtgagtctatcttgacctactaagtgcaccagctgtgctgccaaaaacccacctcatggccgctggagctacccaagttctctcttaagaagtcctttgggtttttttttgtttgtttgtttttgttttcaagtagtcatatcctgggtccgtggatgagggtacggcataaggtttttgagagtaactcaactcagccttgagcattaaagttgtggagtcccagaagcagacaggccacatgggacgagagtcaccagctcagagagaatccccctcagtcagttctctgtgaagagactaaatgtcactagtggtaaaggtgactattgttgacagatgccacctcggagtgtgaggcatggatgcagcagctgtttcactctgacctaacctctgacctccgcgtctttctctagaacagagagaaccacgggctggtggagaagctgaccagcctggccgctctgcgggttggcgatctggaaaaggttcagaagctggaagcagagctggaaaaggcagctacccaccggcacagctatgaagagaagggccgcagatacagggacacagtggaggaggtcaggagagcaccacacgaggggcggggtccaccttcctgttgctgcagcgtaggcagatggtgcctgtgcctcaataaagcagggcttcacagcactgacaagggagcccagagggctggaccctgaggagggggtcagcttccttccctgtccgcctttacaagctgacacagacccaaggagcacagctggctgattcctcttccctctgtcacttgtccacctgcatgagccctgggggcctcctttccctgatctgtgactcagggtttggggaagatttttctctcttgtggtctagtgagaaatcccagcatccttgatgaacatcctaacttagctgctggctagttgtgcagcttggccgagtcactgaccctctgaactttagttttctcatgtttgaaatagaaatgaccaaagggggctggaaaaagatttacgggtaaagttttcatgtgaaatcatttagccagtgtccaccatgggccccccacaggcatgaacgggtgcattctagcattttctaacagagtttctttcgttactgtctgttctcctgtgccttccaaagtcttgaggctcccacatctgtagccataagtccctgagtgcttccctatggcttctctgtgacctagtgcacgggggtgcccatactgctgctgtggcccttgctggctctgccagtcatggccatcactaccaaagggtccacacttccagttctgcaggcctatcatcaagaaaggctgaaataacagactgtgccctgttccccttctttctgagtcacagcagtctcaaaatgtgaatccaccgtgtgttgtgaactaagatgttaattaataaactaccctgggtacccagagctcgggagaggcctgagacactccttggacttgggctcttctcccagatgtcagctgtcagtcatggctggggagatgtgaggactgatgtctgatttgaagtccccttgggtccctgattctgtgactgatacagactgttaatactggctgagccaagcatatgtgattgaagacttcagcacagagcttgtcacccggggccagtgtcagggacttatcatggtctcctcctgtcccttcccttcactagaggttgtcaaagctgcagaagcacaatgcagagctggagctgcagagagagcgagcagagcagatgctgcaagagaagtctgaggagctaaaaggtagccagtgctgggtgtcactcagcactgtgggtacaacggggtctccggtgtgtaattggtacatcatgcatcagggggacaagtgtgtataaaaggtgtgcatttcaccctgtctgtgcctcataaccagcggcccggagtgacctcataacccacagaagagagtgtgagtatgtagtgtattgtatgtttgtgtgtacagttgttcatatgtgtatgagtgggtgagactttgagtgtatatgagaattatgtgtaagagtgtgtgagtgtatgagaacttgtaagagtgggtgtgtaagagtgttcatgagccttcatgagtaactatgtggagatgtgtgtatgagtgtgtgtgtcttatgggtgtatgtatgagtgtatgcaagtgtgtaagagtctcatgagtggcttgagggaccttgcctatgctcggacccagcatgtagactaaaggggcaccaggcctggggtgcagggctgagtggaggagcagtccaaggtggaggggaggtagtcggtgcctctaggccaggttgggacaggacttctggggttcctgcaagaaggctcaccctgactgtggtccaggctttggagccctctggagtcagggaggagtagagatgttgaggaggaacctggaacctgggcagggaggggctcaccccactgaaatgctttttattataccacccttgagtggttgctttgtggaagggggggcatctaacttctttaagtgaagttttccataacatttaaattctcagaaatttatctgagaaactgcctattcggtaccagtagcatgtctgggtggatacttttagtagagttgttatttttaaagcccctaacctacttctctagtttatgagaataaactatgagaagactctcctgttcccttgccttgagtctcctcagtaacaaaccctccaaggtggttctgaagtgtgagagagacacttaagtcgttgtcttgcaggattgtttcaaagactgttctctgtccacagaaaaaatggacaagctcaccaggcagctgtttgatgatgtgcagaaagaagaacagcaaagactgtaagaaatgcttgcctcgagctaccatgaccctcactcagctggtccatcccttccctttctccttttctctccctcccttctctcccctttttcctttccctcccctccccttccccttctctccccccttccctttctttcccttgtcttcccttgtcttgtcttgtcttttctttgtttatgacatgatcccaggtatcactggctagccttgaacctcctacatagccaaggatgcccttgaacctctgacccaccgcctccctctctgtgcagtacaactgctggtttatgcattgctgggagcggatcctagggctttgggctcactaggcaagtcctccatcaacagagctatgttcccatccactctctgctcttttctggtttgcttctcaacttgcagctaatataatccagatcctggcaggtaaggtatggatgtttttaagaagtcggatttttagactttcagggccttttctacagtgtacagcctcaaatgatgcccatgctctgaactgtccatagcgctccggctgatggatcctcactggtcccatggcctttgtttggatcaggccccttccgatcgatctcaattataaaccatccgctaattctcagagattccagtctgggctccttttctcagaaggagtccatgctttatagatctaagtcagaatgatggagagatgtggaatgttcttgggagacagaatctcagggaagcctggggcgatgaggtactgcttcccaatgcagttagcagaagaccatggtctaggcaagccggtgggtaaggaaacttccaaagatggaggagccagctgcacaggtagccctgagctcctatgtcttctcctgcctgagcgaggctgtgcaggcctctcaagtgagcaaagctgtgtctgccttaggcctcctcacagctccatttggcccctggtcatctatctgtgtatgcttggtccctgcacaatcctcagaggcacaagctacttgcagactcagcaggttcaggcttcggatctgaggtttgttgtgcctcaggctccaggtttagtttgggttttggtttttactggcatcttgagaatactgtagtcggttttgggagggggaggtgtgttagaaagattaaaggtttattaatatctacaaaaagagatgaaacagaagtctttgcagagcatgggtctcttcctcaaagtctcctctttgggctattggagcaaataaatcaaggctctgggtcaacatcccagcagtgtgagagactgcaggaagctcacagagcccctggggctgcctcagttctgaccagaccctgtagaataagcaaagtttgtctgtgtcatgtgtctctttatagttgtcgtcttagttcatcactacctgttcaattcatcaacaaggaattcagtttccacgtactttggggcacctggcttttgccgaaatacattctaaaattcttaaaacatggactggaaagatggctccatagttaagagtgcttgctgagcaaccagaatcaattcccagcacttatgtaagctgggtgtccaaagatacctgtatctctaactcagaggggtgtcgcgccctcttctggcctctgtgtgcaaaggtgcaagcatcggggttcacttctgcatacacttacacagacacctgctttcacacatagagacatgtagacacagacagacagacagacagacaggcagacagacagacagacgatggatgatttttaaatttcttggaaggcaagacccctggatatagaaatggtccttatctgaagcttggggccagaagggttttggtttcagttttccatattttggagacttggtgtagacatcactaagagaatacccctcctcctgcagtcccaaaccctaaatgtttcaaagatggaaacttctcattatcacactggtggtgtagttctggattttaccatttctgatttaatttgggggtttgggatgctccacccgtattttttaaggccttaatcagaccttgagggtggatttctgagaacttagaagggccagcacttgacagaatatgccaggtctttgctgggggacatacatcccacccagggaacaatatggcccccaggcatggctttgagatcgcaacactccagcacctagtgtgacttgaagtccagcctctctgtcctgtgctctgtgatcttcatagagtttctcacactgggtgatctaagacatggattttagactaagagaacaggaagctggctacagcgatggccccagtgggtcctaacacacctcctcctttggtgtggaggtagctcctcaattttttcataatattgtatattgtcttgttcaaagactataagaacaattctaagttagattttctccttttaccatctagagttcttgaaaaaggttttgagctgaaaacacaagcctatgagaaacagatagagtctctgagagaagagattaaagccctcaaggacgagaggtcgcaactgcatcaccagctggaggagggacaggtcacctctgaccgcctgaagggggaggtggcccgcctaagcaagcaggcaaaggtgtgtgctgccttctagctcctccagagatgcccttgatcttcacagaaacagtagaaatgcagagatttgggtacagagggaccccagtgggctgttcttttgttaagagatttattaacaccaaagaggggttctaaagagagctcagaagaggcgttgctagggaaccccttcttacagattcaggcaaaatgaggaggatgggtagcctgtacccaggttatcctggattcctgggtggcaggggaggaggtattggttcagccctttagctaagtaagatgtgtccatcatacaggaggtgccccctgtaactctgtcttgctagggtgtttggaaacaacctttggggaagtgagagtctgagtcacagagggtgctctcctttctagccccatcttactttaacatctatatattcccaagggatcagacaacaggagcatccatacagactgaaggcacacagcacccgggtactcagttctctccgtcccagcctctgggctgtctgaaaaatgtatttcatatttgaaaagtcaggttctaacactctaagattgtaactatacagttacttaaatagattgactaaaagaatactacctatttaagttataaattcaggtgaacccttattgtttatcatattataaacttatgaattcttgtactgaagtgaaattgttgctatccaccatttacactgttacatgaaaattcacatgggtgatcaggaggacttcaggtctggggatgcagcctgattagtagactgcctttttagcacacaggaggctccagctttgactcccagagcaccaaagtcagaaacagtgtcgcacttctgtaatcctagcatgtgggtgctgggaatcaagcccatgccctttggaagagcagccagtgctcttaactgtagggccatctctccaggctgatcttaaatcgggggaactgtgagcctgcacttggagggaggcaccagtagatgtcactctcttcctctgatgctttaagaggtctggttttcagagctcttgaaggtcattgtcaagctctctgtgatgcaatctgaagaaaataaggaagtgtaaacattacctgaaatatgtaaagaaccaagaaaagaaccaaggcttcagcctgggcagtcctgtgagcttgacacatgatcccaaatgtgtcatttaaccttcagttcattttctaatcgatgcgggctcagcttgttccactcacttcgaggcctgctaggaggactaggtgtcgaagtggagcactagtatttgatcccctccctctctgaattgggagctagaacctgtcaatactccgaataacaatatttgaggagggctttttacccctgctacccctgagaatatctctatctgtcttagctacaaaatatgaaaaataccttcctcgagatgaacttgcagagtgaacagaggtggatgcagcccctttaacaagcagagatgctcatgggaaactgtccctggtggtcttcccaggctgcttagcctcccctgcctctgtgacaaaacgcctcctagcaatgtaccttcgccttccgacctgcagttttacccgtcttgccctctgcctgtctcatggcaaacttgtgattgtttccttccgttacaacagggaagctcattcctgcatccaggtaggcctgcaaacagttgcacagttgagctgcttcagggcaagatgtgaggctgtgagagtagataagattcctgctaggaagccgcatggaggcgggaggccaccatatgctctgtgacggggtgtgcccttgcctgatgagaagtgtaacggctgttttctctgcactggatctgtttgcggctctgatttagaccatctctgagtttgagaaggagatagagctgctgcaagcccagaagatagatgtggaaaagcacgtgcagtcacagaaacgggagatgagaggtaccaggggcatggactggttactgggtagtctgggcagcttgctagttggatacctaagagggtggccagctggtaggccgtagaaacaactgcagagatgccatgggggtgaagtcatgcccaaattcaatgtctgctgctctctctttccttctagaacggatgtcagaggtcaccaagcagcttttggagagctatgacatcgaagatgttagaagcaggtaatcgattttacattatcagacatttacaaatgtaaaacagattggaggcatgactcggcaaagtgttaacatgtgagtgtgatcccaagagtccgtgcatttcagaagaagactcacgtgcgtgtaacccaccaatggggaggtagagacagaagaatccctgcgcttaccgagaagctagtgtagcctactcagtgaggtccaggccactgagagaccctgcttcaaaatggtcttgggggttggaaagacagatggtttcgtgggtaagagtgcttgctgctcctgccgagatcaggtccctgcagccatgtcaggtgactcacaatcacctgcaactccagcttcaaagggcatctgatgctgtgttcaggtctccaccagcatctacacacacactcatacacacacactcacacacacatgcacattcacacacacacacacacacttatacacatgcacactcacacatgcatgtgcacactcacacctacacacatgcacacacacttacatacatgcacactcacacacctacacatatgcacacacacacacaatgtgcacccacacacatgcacacttatgcacacttacacatatgcacactcactcactcacacacaatcttttatatagcaaggtgaaccaccctgtagggacgacatacacaagccatgtaaaggtgggcaaggcttctttgctctctttctttgctctccaggctctctgtggaagatctggaacatttaaatgaagatggagaactttggtttgcctacgaaggactaaagaaagcaactcggttagacattcccttgggattctggtgtgtttgtttggcttggtttggttttccagagacaatacaatgttgagaagttcaccttgcctagaattgacacgtgaagtaaattcttatggtagaagtgtctaataacccctagaaagactcctctgaaaatgcagccgtttgcctagtgaggaggcctagtgtttgctaacaactggttacagggctggggatttggctcagttaataagaatgcttgcctggtatgcataaaactctgatttctacccctcacactgaataaatggggtgttatgaggcacacccagaactccagcacctggaaatcaaaaagatggagaaaaccaagaatattcttaactacctaagaagtttgaggctagcctgggctaaagaccctatatcaaaaagcaaacaaaatctgtcctggagaaatggccagttgttaactgctcttgcaaaggacccaggtctgttagattcccgacacccacgtggctgcttacaaccatctataaccccagctccagggggtctgatgccctcttctggcctccacaggctttgcacacccatgcgagttctcgtatatcccttcactagctcatgcagcctccccattgatagcttacatcactgtgtggtgacacagcagggtccccaaaggctcacattggaccccgtcttgcacactcagtgaatcctccagatgtgtagagacacataatcacaaccgtatcacacagaatagagggtttcgactactaactgtaagaacataactgaactacttctaaaatgaaacgcctttgtcataactgtgttaacactgcacactgtttttgaacggtgactgagggtctttgattaccgatcctcgttccctccatctctgtaaaagcattgtcagttttaggtcctgaggctgaaatgctgaccctagctttctcagctgctgcaacacagagaccacggcttcagtcctccacccttcctttttttttttttaatgtgttaatttttttatatttttattaggtattttcctcatttacatttccaatgctatcccaaaagtcccccatatcctccccctccctactcccctacccacccactcccactttttggccctggcgttcccctgtactggggcatataaagtttgcaagtctaatgggcctctctttccagtgatggccgactaggccatcttctgatacatatgcagctagagtcaagagctccggggtactggttagttcataatgttgttgcacctatagggttgcagatccctttagctccttgggtactttatctcctccattgggggccctgtgatccatccaatagctgactgcttccacccttcctttaacagagttctggagagccatttccagtctcagaaggattgctatgaaaaagagattgaaggtctgaacttcaaagtcgtgcacctgagccaagagatcaaccacctgcagaagctgttcagagaagagacagacatcaacgaaagtatccggcatgaagtcaccaggctgacatcagaaaacatggtatggcctctccacagcctgcttgtcaccattgtcccagagacattattcactggtggagcaaaaaatcaattctcagcagccaaacaactcattttaactaattctctagcgacaaataactaggtcagaagataactctatataatgtccccaggttagaaaacactcaggtttgcgagtgtttgattaccatgtggtgggtgcaaattgtgtgaatgagctttctatgtttagctctagctccaaatgcctgtaaaggaacgaaaagcagatcaaagcaaacatgtggctcttgaggggggcatggtcatgtcaggccatctgttcatcccccagatgtccctgagttgttcccttcttcttgtgtttatctggtcctttcttctcatttgcacctgctttcaggatacacacactcataatgttttccagatacaaacaaacaaacacatacagacacaatcctttcaagatacacgcacacatatgcacacaatgctttcaggatctacacaaacaatgttttcaagatactcacacagacacacaatgctttcaggatacacacatacacatgctttcttatccacggtgccttgcggtcaccgtcccatccatttctttgtgattgatgggtcttctcaaaggtcattaaccactttcttccacatgtccttcttcattttctctgcagccactactttctgttatgtgcttctcagcaacctgtggcaatgctggctactcccctgcctctgagattgcagaggatcacactcgctgtggctacttcttccgtctcactatctgctgtggctttgcttctttcctccttctctggccaaaccataagttgggacatccccggggcgtctacaggagctggaactgtgctgcagtcaaaggccttcgtaggatgtgtattcctgggataaaccttgatgaggaaccaacagtgaggtattctgtgtgtttgggcctcagaggcctgtttaaacttaagagaacagaaagaagaaaaaaaaaagcaactctttttatctggctgggtgtggaagggatgaatattcaaaaagatacacaacaaaggagaatggagagccccggacgactccagctgcagagtgttctgagatagtgtgccgtcctcttccaggtgagatggcactgccaggacctggagcagctcagcacaaggcacccttcccttcccacaatgcacctctttccttcccaggatagccatgtgagaactgctctctctgagcatgctgggatttcttgagaccactacaaaggtcttcagatgaagggggaggggatggaatgtcaacgaatcccagtgtctccgctggcctctcacacagcccatgtactccacacgctgaacaaggagatgggtgtcttggagagcataaacattcaggctcaagcattaattaatctctctcctctgaagatgatcccagactttaagcagcagatttcagagctggagaggcagaagcaggatcttgaatcccgcctgaaggagcaggctgagaagatagaaggtaatgtgagttatcctggttccgtttacagaccccagcaactaggaaatgcagctaacacagagttaagctgcgaaaaaaattcagaaatctagatgttattcctttagatataaaatgttattcctttttaatttttaattttttaaaattttatgtatatgagtacactgtagctgtcttcagacacaccagaagaggtcatccgatctcattacagatggttgtgagccaccatgtggttgctgggaattgaactcaggatctctggaagagcagtcagtgctcttaaccaccgagccatcaaaatgttattcttaaataatgatttatttaaaaaaaatacctaaatactccagctgcatatataacagagaatggccttgtccgacatcaaggagaggagaagcccttggtcctgtgatggctcgatgccccagtgtaggggaatgccaggacagggaagtgggagtaggtgggttggtaagcagggggaggggagatgggctaggggggtttcagaggggaaatgaggaaaggggataacatttgaaatgtaaataaagaaaagatctaataaaaataaaagggaaaaaaaaaacaaaagcaaaaacccaaacctcattcagaccaaacaaaacataactgactggatagggattagaaccttagatctgtgaaaataatggcaaccccaaattagagcccaaatcatggctgaccacagcaccgacaggtttctcataataggaaagctggaagagccgttcagccacctgaaccgaatccgagaagaggagagaatgcagggcaggtaagtgttctggtgggaactggacaggccacttccatctgcgccaatcaccaacagaagggtgctcacacccattcccagagcgcctcatcccttcctcagggccgtggaagcacagagtgagatgcatccagaagggaaggagaggctggtgggtgcgatccacgaaccgcatgaagccatcaagttcccaaagaagcaaccagaagctgaggaggaagtcgagagtattctccaacaagaagcgtcccggctctctttggaaaagagggtaagagaagttatgattggctgcctgtatgggggtgttgctgagcgagagatgggttctgaaggagccaccatcagtaagtgaaacaactgtagaccaaaaaggccttctgtcagagcactgtgtccttatctcaggcaggtggttgtgatgacaaacactcagccgtagagcgattgccacccccaccccccaggtctgcacagtcagggcattatggtgaaggtctgaagtcccagcactcggaaggtggcaggagaatcagaactaaaggcaaccctgaacagccagctctacatgagaccctggtgaaaagaaaacaggaaaacagaaaacaaaacaaaacaaaacaagcagtcactttcagagctgaaacactctatgacctttataagagatgtttctgggtgccaggaaccagtgttaacactcttagggtttaagtcaaacccaggataggctaggccacctcttcacttgaaaggaaagggaaagccacacccaagcctcaggacagcctctctggcgccctcttctgacatccaaagagcacatttcccaggctcttatatttttaaagtctgtgttggacattaattcgtaatcaaggaatatagatcaagatgtacgatatccatagagtagaaagttgtaaacagatactaaccatatgaaaatgttgttatgtggaagtatcagaaataaaataccacgtcttgtataataattcccttggttcagggtgtctagaatagacaaaccgacagccacaggaaattgttgactacagaatcagactagagggtggcagctaaaggctatagtgttttaatttttttgaattaggtttttatgtttcttatttaagatttctattgctgtgatgaaaaaaaaaccaaaacaaacaaacaaacaacttaggcttatgtcagttcacattccacatcacaggccgtcagggaggggagtcagggcagaaactcaaggcagaaactgaagcagaggccatggaagagcattgcttgctggctttttgctggtggtttgctcagcacgcttttttatatcatccaggactccctgctcagggatgttaaaacctacaatggggtgagccctcccacgtaaatcattaatcaagtggagttcccacagtccagtctggaggggacattttctcaattgaggttctctcctctgagataactctagcctatgttaagttagcaaaaaactaacaaggactctctctctctctctctctctctctctgtgtgtgtgtgtgtgtgtgtgtgtgtgtgtgtgtgtacaacttgcaggacccactatgtgggtactggggattgaactcagcatcagtcttggagacaagccccttgaccccctgagctaacccaaatgtcgtgttctttgggagtcttctttagtgtcctttaggggtgcgttggaaacatctagagctggctaatacagaaaacaactgctgtgcaaatcatgtgtgtgaatgagttttacatgtgaaatagggctccataaaaccattaacaaaaccaaagccaaagaggcttccaataaaagcccttgcttctttgggtttctgcaggatctcgaggaagagttagacatgaaggacagaatgattagaaggctacaagatcaagtcaagactctgaccaagacgattgagaaaggtaaggggggatagcctcattgtttagagctcttaggtaaggcgctgtgtacggaaatgtgtgagcactgccttgtccaaagcccacaaagcccaatggaaggaggctcagggtcaggcttaggacctagggatgagctgaagagccttcgaggcatcaaagctcaccgcgtccgacaccacatgctctcatttccagagacaaccacaaacaaatacgttcttcacctcctcgggtagctccatactttcaaaatgaaattgtaatggagtatccaatgaatcattttgaagactacacagatagcggatctctgagtatcccaatgtctgttagcagagataaacagaaaggaagaaggcagacatggcacctcagctgaatggtgtgtgtagccataagacccaaggaaaggagccttccttccctctgccttggagtccatgtccgagccagtgttctgctctcatctcctgctcttcacacttcccagcacaggctgcacctaaaaccatctctttcttttcccatgctcgttcctttgaagagctcctttattcgtaggaagtccacattaatcttacatttgaaatagaggcagacacagccactgtcctataaatgcttcaactgagtagagactctttcctcttcaggaatagatgttccgtgccaatctgccccatgagagcaggaccaggtctgggtatcctgtcctttatggctctactgttgggactggtgaatggatgaattcatgggtagataatggactgatggatgaatggacgatgggtggatagacggatggtgtgtggatagaagatgacagatggatgataggggatggatggatgggtgaaaggtgaatgggtggatggatggaagatagatgaaggatagatagatgaacagaaccttgagctacattctctgaataatgcctacccaaacccacatctaaccctcacttcttttcctaagccccagattcagtttgtctctttgactatttttttttcaactcaatacttttcaggcaaaatcttttctgcctgtatcagttatccattattatgtaacacatttccccccaaacttagcagtccaacattaataccactacatctgtgattatatggctcctatatcttcactatgaatccgggaagtgtggtttctgtgtatgtagctgaccgtttgcctctgtctgcagccgaccatgtgcacctgccctcgggatccagggagtacctggggatgctggaatacaagaaagaagatgaggggaagctcattcaaaacctcattcttggtagtcgaactcagatggcatcaaactcagatggcatcgaactcagatggcatcgaactcagatggctctgctatgctttctctctgagaacttgaatctcagttccagagtcctgggcagggctggcctttctcttctctcttctttcatggcttcttccctagcttgaagcttcctagctttagcgctaacatacccagctattcttggttgagggagaggggttttgcatttgcaaaccacagcagtacattgcttgcctctgcttacactagaaactggtgtgaggactgccagtgtcctttggggaaccaaaatagtcctcagctgagagctactgccccaactttctcccaggtaatggtagggtcaggatggaaaacacagctcctgaccctgggcatggctgggcactcctataatcccagcactcaagggcagaggcaagcagatctctgagattgaggctagcctggtctacagagcaagttccagaatgggcagagctacacagagaaaccctgcatcaacaccccctgtcccaataaaaaagtattgtgctattgattacatttaaattcttgttaacaaaatgcctgatatatacaaatggaagaaagatttgttttggcatgaggaaccagctgagttcctggtgctacaagtgtatggtgaaacctgtgcacatcacggaaacagaggcatccccagggaactaggggccttctttaaaggcccacctttaatgatctaatttcactagctaggtaccagtctccccaaatagcaccactagttgggaaacaaatattcaaagcctaagtttataagggacgtttccgtttcaaaccctaacaccactcaacccacgctgacacagaagagacctcttctctgcagttgtctgatctctgccacaggaagatgctgttttcccttcacgcttccctgcaaggtctccttcttcatctctgctctttctctctgacatctttctttaagatactagcttatttatttaatgtgtgtgagggtctacctgcatgtatatatttatgtatgtgcaccatgtgcagtcttcgtgttcatggagtccagaaaagggtttcagattccttggaagtggagataacagatggttgtgagccaccatgtggttgctgggaactgaactgggttctctgtaagagcagccagtgctcttaacccctgagcacttctccagtccctctctgacgtctccctgtctcttctgccgtactgctggtcactagtgtctctattcaagacagcttctggtgacttccatccttatcaaagggattggaatgagatgcctaggacttgggttcctttcttatactggggaatccaatgtctagagcctcctcactagagaaaattacaacttctttctcctatctggactcttaaatatggggtcactttacaaataaggtgtgaagggagccagtagcccccatctactttagccaaataagaacccagattgagtttctctgagagaagacacatctatgctttcaggctccgcccaagcacagaaaggtcaggagcccaacccctcccaccctccctcccagcaacctccaccagcagtcctaggaggggggctccccagtggctgagagcttgtttctttctgctgcagacctgaagccccgaggtgtggtggtgaacatgatcccagggctgccagctcacatcctgttcatgtgcgtgcgatacgcggactccctaaacgacgccaacatgctcaaatccctcatgaacagtgctattaacggcatcaagcatgtggttaaggtaggggtagccttggatgtgggtccttggtatagtgtctgattgggaaatagttctgggaaatgaccaacacccagtctttgtctgcccttggcctctgacctttggagagccgtgtgagtccctaaagaagcggggccactaaggaaagacatatgggcgagcttctgccagggggcctcaaagacttacagagaggacacagcctagtagttaccatcctcgctcttccactccctcatgtgtgagggatatgtgctctatctgtgtagcagtaagggaaatgggaaactgaaaaattattcatgtcttttatcggcaagtatattattctccttcctaaaacattattattattcgtgctggggagagagctcagtggttaagaactctggccactcttacagaggtccttggtttgattcccataccccacatggtggctcataaccatccatagctccaggtgtaggggatctaatgccctcttttagacacacatgcaaacaacacacacacacacacacacactttttaaatgaaaaccttatggttacggtttttcctagtccagaaaagaagacccatgtgttcattaagtcggtgactttgtaaagttcagtacaatagctgagaccccgtcccgtcccaccacacccccacaggcagtttgttgaagaagatggagagccttcttgtacatcccttaatgattcatccagcttgaaggtcggccctactccacacagctacattgggcccaggctctattcagcctgctgaatgtcactccctagctgtgttcatcagaatgaccaggcagctagaccacccgcaactggctgctctgtgggaagggagccacatgcccctggcacacagatcaccagttaccagctaagttagttcttctgtttaacacagggtttcagtgtgtaatcccggactggcctcagacttagagacctaccagcctctgcctccctcccctaagtgctgggattaaaggtgtgtgcggctacacccacccaacattctcttctcttgtctaaggaacattttgaagatttggagatgctgtccttctggctttccaacacttgccattttcttaactgcctgaagcagtacagcggagaagaggtagggagcatgtctgtcctgctgatggcctcctgggaccacctcctgatctggctcaccgaggcacacagtggctaccatgatgctctgctcccactcctcacagcctctatgccagctagcttgctggcctcttcacccaggaggccaatctgcctatcacctgttaggtgcctaaatgttactacatgctagagactccaagaagttcaggccttggtcttagtataaggttttgatcaataagctttcagatcctcaggagatgagatagccttgtttcctcctgaaggggacattctgtggatttcagtatgatgaaacaaaatgtaacccctggttcatcatgctaactgttctctctaaaggactctattctcccacgacccataagtcgatgacgcctgcactccaaccctctaggaactgatatcataaaggtgttctttaagcttcacaaggggtatttttcattgaattggagtaaccaagtggcttttagggtgttttatgccacatgagaagccagggaaaatactgggtgtcttcctctgtagctcctgctccagggacagtgttgtgactctaggtgtgactgactaagatcatacaataaatcgctatcatttaaaagcaaacactaagttttaagttgtggcattaccctagatgctgattatagcatctttagtatagacagtatctcagtttccttcctgcccacagcactctgatgtttgtgctccaattacttccaggaattcatgaagtataacagcccacagcagaataagaactgcttgaacaattttgatcttacagaatacagacagattctcagtgatgtggccatacggatttatcatcagttcatcattgtgatggaaaacaacctccagccgataataggtaagaagagaataggaccgagagattcttctatcgtaatatcgaagctgtttgttttgagacagagtctcctatgtcctcagctggccttgaacttgatatgtaactatagccaaggaaggtcttgaactcatgattcttctgcctgtatttcctaagagcagggatttcaggtatatgccatcatgcctggttttgcttgggactgggaatcaaaccaaggcttcatgcagagtaggcaagcattctaccaactgagctacaatcccagcccaagagacttttaaaaatagaaactgcgtgtgtggtatatgtgcttatggataacatagctcaaaaaactaagaagaagtaatcaccataaatgtctacctttcaattcttagcttgcttaaaatgactctataaatcctagtacatagttgacctttttctttgtataagtatgcctttttcctgaagaaaaccctatggagaagttacactatttattttatgtgctgtgtggtttcttatgtggctgtaccaaatattttttgaaatccgcaaatcccactcacatttgtgtataatttactccactctgtaaaacttaaatatcttggggtttgatgactccagaccccgacctacttgctgttagttagcagctctctttcccatgagaaccactgtttcgagcctccaggaagtgcccctgcccttctgtaagctgtgattcaggccctggcatactctggtaccccaatgtattcagttattttttaaagtattaatacattttgcttgtttgtttctatgtcaaaagaaataatagcacacatataagattttgactcacatattaaggaaacacgatccaccaaggcaagaatgccaacttggcaggaccatgagtcagctgctcatactgcatccaccatgaggaagaagagagagagagagatgctcgaaggagctcagatagcttttttcctcttatttagtccaggaccccatgcatgaatgcttctgacctacacataaggtgggttttcccacctgcatttactcagtcctggaaaatcccttatagtcaggcccaaaagtttgtctcctagtctaaatcccatcaagctggcaaccaaggttagccacaccactctatcacaacgatacccactgactatgagcaaagacacctgagattaggggacgtgtgacccggctgacccctgtgtaaggagccttccgcccttctggcagtgccaggcatgctggagtatgagagcctgcagggcatttccggcctgaagcccactggtttccggaagcgctcatccagcatcgacgacacagatgcctacaccatgacgtccatcctgcagcagctgagctacttctacagcaccatgtgtcagaacggcctggaccccgagattgtgaggcaggcggtcaagcagttgttctacctggtcggggcggtgaccctcaacagcctcctcctgcgcaaggacatgtgctcctgcaggaaaggcatgcagatcaggtaaaacccacatgccatgccccacctcccagaggccagctggaagaaatgctcccgatgctggacccttcctgcctccctacgccacccccccccatcccccggatacatgcaaggctccactgagccctctgagcgctggtttgctggtggctgcacaccaacgcgttcacactctactgccaacgtgatgctttagtctatgagaacgatattagtatgtcatggattgtgagtttccaaggttatcgtattcttaactagtatcaatcacttgcttggtgactggcccagttgggtagagaatccagaaaattgccgagaggctcaacacagctaagtagtagactaagacaccaatcatgtcacagcaggtgaggacagatgtaccgaggaagccagagagatgagtactagatgacaagcttgagaaagaggaacattgcaggcatgagatagatgaagacaaaggagtggtccatccccggctctgcctggagtacagtaatctgttgttaggaccccgagggactgccgtagagaggtgggttcaatccagaccaagagggttcagaatgcagtgcaagcagatggggtccatcttggaggcatgacaacacagttgtaaggaccatggaccccatctaaattgaggacccatggagcctgtgactaagaccacataccataggaagatatttaggatatgtgcgtatattcaggcagttgatacctatgtgtgctccgagagcttgggaaatgaccataggtgtgtgctatcatctgattgaggtgacaaggtatattaagcctagaaatccctgcaaagaatccatcatgcattcttagcactcatgaaagttggatttcccataaaccatatggcgccatattgtaggttttagatgccaaaggactttgcaaatcctttgcttttcattgagaactgaaaaaataaactgcccattgcacatctaagcagtgagcctgaacgagcctcaactgagacaaagcaggggactggggaggtggctcagctggtagagtgcctgcctagcatatacaaaggttccatccccacaccacaccttgttcacgactggcttcgatcctacagccccacaccttgctcacacctgggatcctacagccccacaccttgctcacacctgggatcctacagccccacaccttgctcacacctgggatcctacagccccacaccttgctcacacctgggatcctacagccccacaccttgctcacacctgggatcctacagccccacaccttactcacacctgggatcctacagccccacaccttactcacacctgggatcctacagccccacaccttgctcacacctgggatcctacagccccacaccttgctcacacctgggatcctacagccccacaccttgctcacacctgggatcctgcttgtcacctttctgtagtttttagtttaattccattgtggccatagatcattactttgtcagttaaacacttagaaataggaatcagaatgatgtttcccagaaactctgataatagattacaacatcaaatctctgggggaactggccttcttgttgttacataatgtcctgctatcccttcctggaaattttcttttctttgaagttttttaaaaagccactccagatttatttgattaatattttcataacatattttatttacttttaacatatttatggcatatatgaggtgaatttcttgtagataacatatacaagtatcttggtgttaagactttgtttttaaattacttgtatggggggtggaactatgtacatgtcagtgcaatactcatagaggccataagagggcatcagagtcctctagagcagtggttctcaacctgcgggtcatgacccccatagggacaacatatcagataacctgcatatcacatatttacatctgactcataactatagcaaagtttcagttctgaagtctcaatgagataatttttttaaagtatttattttattttttatgtgcattggtgtttcgctgcatgtctgtttgtatgagtgtgttagatcttggagttataaacagttgtgagctcccatgtgggtgctgggaactgagcccaggtcctctggaagtacagtcaatgcttatgaccactgagccacctgtccaaccctgcaatgagatagttttgtggttgggatcactctagcgtgaagcactgcgttaaaaggtcacagcattaggaaagttgaaaccgtggctctaaagctggagttacaggcaattgtgaggggcctggtgtgggtgctgggaaccaaacaaaggtaggtcctctgtaaaactgctgagccctttctccagcccacgtcgtgttttgttttttaatccagtctgaccatatgttcttcttaattgaagaatttagaccattttaatttaatgtaatttgtgatatatttaggtttgtttcccgtgtcattttctttcttgtgatttattttcattctttttcaaacatgtatatgtttgtgtcagggtaagtgtatgtgagtatggtgcagaggcagtgatccccctgcagttggagttcgaggccattgtgagcagcccccctacttgctgggaactgaactgaggtcccctcttcgagagtgggaagttctctcaacccctgagccatctctctctccagcgcctgccatactattttccatgtgaacctcctgggttttgtttctctggtttcctctttctgcctttgtgtgtgtgtgtgtgtgtgtctagaatattttgtaatctttctaatgtattatgttgctttttagtgggaatggaagcacacatatttatgtattcacaacacatttagaatcaacatcaccatgccaacattttcccacctcataggacttttgacactgtcctattatgtcactgctgtcttacagagaatggtggtgatcggaaaagctctctcctggtccctcccctcctattttaagtaagagactgctgggctttgcttgtaaacatgcagtgagctctggggcacgctgaggggtttgacactgtactgaaaggtccctctggctttctctaggtgcaacatcagcttcttggaagaatggctaaaagataagaatgtgcagagtagcttagccaaggagacactggagcccctctctcaggcagcctggttgctgcaggtgaagaagaccacagacagtgatgccaaggagatcgcccagtgttgcacttccctgtctgctgtgcaggtgagcgggctggcccagctcctctttgaaccttgaagggcaggtccttaggcattttccagcttagcccgctgtgaggtgcaactgaccctccgtgacgtctcctcttttttttcctgacaactatttggtatatactgattgcaggcttcaaggatgacttcaagtgtacatgtgcactaaactgagcaggggctggggggccagagagggagcccacctcagtgacatctgaccatgtggttagtttgtgctgcactctgtaccctatgctattttctgttcccttgggatcatacagcacttggctccagagataaattataatataaaagattcacccatacttcttggaggctcctaaatgtccagaactgtttgctctttttcgtggtctcatcccgtgctctgtaatgttcgcagatcataaagatccttaattcatacacacctatagacgacttcgagaaaagagtcaatccatcctttgtccgcaaagtacaggtgagatctttatgtgaacatgttaatctgacctctgatactctataatacactgatgctcaattcaaatgtggcagtccaaggttaaagcatggttgccaagcatatgaaataccagctcaaagacagctggtggctttttgatcgttccagtcctgctgagaaggaatagaaacataaaccaagatctgatcttcagctcgcgctcgtgcgcgcgcgtgcatacgtgcatgtgtgtgtgtgtgtgtgtgtgtgtgtgtgtgtgtgtctaccacaatgtgtgaattgaggtcagaggacaacttacaagagtcagttatcttcatccatctcacgggtccctgggatcaaactcaggttgtctggattggcagcaagtgcctttccccactgagccacgtcactcagcagctcatcttgaggcatagagcaaatgggcagagcccagtggaagcagatctgcagacccatttttccatgatcatccccaaaggttctcttccagtaaactagggggatcttgggggaacctggagaccctcccaagagtctgcagagcctttgctttttgcaaaagctgtgcctgtatgaggtagagttccctcatacttaatccagagcaatgtacctcagcacactgaatacagaagcaggcatcccacaaaatctccacaaggtcagactttaggttcacagaggaccctctgtcctgcttctcactgtgctgcctttttgtttgtttttgcttttcattctgaaaatttagctattttttaaacaaaaatgttatgttcaatttacctaatttattaatatttaattactgttttagttactaatatggtaaagtatcactagttgtgtccacatatacaaaagctctttggagtcctcataattattaagagtataatgtaaggccagagagatggctcagtagttcagttttcagcatctgcattgtgagtctcccaattacctacaatgccagctccagagaatctgatgaccccttttgacctctgtgggttctgcacacacattaaattttttaattttaaaagtgcatttggttggttttgtaagacagaatttctctgtgtagcccttgctgtactggaactgtagaccaggctggcctcgaacttagagatctgcctgcctctgcctcctgagtgctgggactaaaggcgtgcagactaaaagacttggcagttttttgaaatgtaaagggtagaaagcaatgctgataacaaaggaacaaatgcatttgattaaaaaaaaaaaacagggctggagagatgtctcagcggttaagagcaatgactgctcttccagaggtcctgagttcaaatcccagcaaccacatggtggctcacaatcatctgtaatgagatctgatgccctttctgaagacagctacagtgtacttatttataataataaataaatctttgggtcacagtgagcagggactaagagagcggggttgaccagagtgagcaaaggccctaaaattcaaatcccaacaaccacatggtggctcacaaccatctgtaatgagatctatgccctcttctggtgcatctgaagacagctacagtgtacttatttataataataaatgaatctttaaaaacaaacaaacaaatgttaaaatcttgagatccagtcatgtctgggcttagaatttgaccttgacatatacatcagaataaaaaatgccagcaggatggctcagcaggtaaaggcacttgctgccaagcctgaagaccgcagtttgaccccagaacctttgtggtagaagaaccatatggtggagaactgactcccacaagttgtcctctgatctccacatgtgtagacacacacacacacacacacacacacacacacgaataaatgtaacttttatgtatttatttaaagatttatttatttatttatttatttattatataagtacactgtagctatctacagacacaacagaagagggcatcagatctcactacagatggttgtgaaccaccatgtggttgctgggatttgaactcaggacccctggaagagcagtgatcttaaccgccgagccatctctctagccccaagtgtaacttttaaagggggataaaaacacatttacactcagcctgtctgtcctatgggaatgggcttttggggtgaaacatcaggtgactgttcctgggagctagctgcaccaaaggctctgataggcttattccccgcacccgccccttgcccaaatcccgcccccaactgtgtcctaaaccacgtgggtgtcacagcctgtgattgctggtgttctctgacagagacagagctgttgggttttcttgactcttgacctcagtagtggcgaaccagaatagtggcaaaccagagtagtggtgaaccagaatgcacctgttccctgatccctccccttggttctgacctcaggctcttctgaataaccggggcgactcggcacagctgatgctggataccaaatatctttttcaagtcacatttcctttcaccgcctcaccacacgccctggagatgacccagatccccagcagcttcaagctcggctttctccggagactgtagccagagagaagatggacgtgagttccctggagtcctgagtgcaggtgccacggagggatgcagttattcaccagagcattgtgatggattgcaatttgaggaaaaaccacgccccacctgtctcccatgatgctttgcaaccggctgggctgggaaaggctcttgcttctgatctcaagtggctattgttgcaattcctgaaggctcagttttgttcctggtgcctttgttttgtggcagggacctcccctcacccacatatatacaggagtaaaatctagaggcaccatgactcccccgatttctagggttcccgtgaagtgcagagacatgtatgaagccacagttgagttccatgcctacaccttctaggaaagaattccacgtggccactggaacaaagtctttttgccccatccctgttggcaggaagggctcgttagctcctcctactaaagacgactggattagaaaactactccctttagaaactctaagagggtattcagtctaagagcaggtcatggtaacccataactagaatcccagcactcaggaggatgagaccagagatttatctcgagttcagtgtcagccttgactacagagtgagaacccatctcagagatagatagatagatagatagatagatagatagatagatagatagatagatagataaatagataaatagataaatagataaatataaataaataagagcattttatttatctattttatgccatttatcttttttctgaaaattttaaaacttgttattagccaacatagttattataatctttcatttaatttttaaatacagctatttcttttaaaactacatttatctctggggtcagaactcagtggtagagcagttggccctgggtttggccccagcaccacacatgcacacgtgtgcaacttaagtttttttttcctctttctaatcagtgttctaatatgctttttaaattttttttcacgaaaaaaaaaaaaacaacaacagaagatatggggaagctcttccttttgagaaatccacttttcccaggttttgtgagaactagttattccttccctcaaactgttttccttcccttcagagaactgagtcctctgatgagcactcctgacccagagctgagacccatcactctgtgcacccctagcaacctgacaaccctccagtctgatggtcacaggcagtagctgtgacaccacagaatggtcctctctggggcgaccggttgattgttcagtaccacctactaaacgtgtagtcatcctactgacatgatggctttccaaactgttcccaagtgctgaaaatagaactttataatacttaaataaaataaattattgagc

SEQ ID NO: 2348 - DNA, 1600 bp, Mus musculus
cagtccgggcgccagagccctcgggggaagggagccgtggcactcgggaaaacttctgcacaagatggccaggcgctgagtgcctgggcgcgcacagtcccctgcagcaacagcagcagagaggaggtccatggcggtggccgagctctacgcgcagtacaacagggtttggatcccagatcctgaggaagtttggaagtcggctgaaatcgcaaaggactacagagcgggtgaccgagtcctcagacttctgctggaggatggcatggagctggaataccctgttgacccagggtcactgcctccgcttcggaaccctgacatcctggtgggtgagaatgacctcacagccctcagctacctccatgagcccgcagtgctgcataatctcagaatccgcttcgcagagtccaaactcatctacacctacagtggaatcattttggtggccatgaatccttacaaacagctaccaatatacggggatgccatcatccacgcctacagcggacagaacatgggtgacatggacccacacatctttgcggttgcagaggaggcctacaagcagatggccaggaacaatagaaatcagtccataatcgtgagtggagaatcaggagccgggaagactgtctctgcacgctatgccatgaggtacttcgctaccgtcagcaaatcgagcagcaatgcccatgtggaggacaaagtcttggcatccaatcccataactgaggctgttggaaatgccaagaccacccgcaatgacaacagcagtcggtttgggaaatacacagagatcagctttgatgagagaaaccagatcattggcgccaatatgagaacttacctcctggagaagtccagagttgtctttcagtcagaaaatgaacggaattaccacatcttctaccagctttgtgcatccgcacagcagtcagaatttaaacaccttaaactggggagtgcggaagagttcaactacacaagaatgggaggtaacactgtcattgaaggtgtcaatgacagagctgacatggtggagacccagaagaccttcacactactgggtaagagacaccaaggattcaagaaagattttcaaatggatgtttttaagatcctagctgccatcctgcacctgggcaatgtgcaggtcaccacggtgggcaacgagaggtcttcagtcagtgaggatgacagtcacctgaaggtgttctgtgagctcttgggcctggagaccagcaaagtggctcagtggctgtgcaacagaaaaattgtgacctcctcggaaactgtggtaaagcccatgaccaggcctcaggccatcaacgccagggatgcgctggccaaaaagatctacgctcacctgttcgacttcattgtcgagcaaatcaaccaggcgttgcacttctcaggcaagcagcacacttttattggtgttttggacatttatgggtaagattctcttctgcctgcctgcctttcctcgtttaaatgtcaaacgccctgttgtttttaagttgcacccttccacttgtcttgcttgttttgaagatgattttatttttctttgctgaatggagagatgttaaatata

SEQ ID NO: 2349 - protein, 437 aa, Mus musculus
MAVAELYAQYNRVWIPDPEEVWKSAEIAKDYRAGDRVLRLLLEDGMELEYPVDPGSLPPLRNPDILVGENDLTALSYLHEPAVLHNLRIRFAESKLIYTYSGIILVAMNPYKQLPIYGDAIIHAYSGQNMGDMDPHIFAVAEEAYKQMARNNRNQSIIVSGESGAGKTVSARYAMRYFATVSKSSSNAHVEDKVLNPITEAVGNAKTTRNDNSSRFGKYTEISFDERNQIIGANMRTYLLEKSRVVFQSENERNYHIFYQLCASAQQSEFKHLKLGSAEEFNYTRMGGNTVIEGVNDRADMVETQKTFTLLGKRHQGFKKDFQMDVFKILAAILHLGNVQVTTVGNERSSVSEDDSHLKVFCELLGLETSKVAQWLCNRKIVTSSETVVKPMWQAINARDAKKIYAHLFDFIVEQINQALHFSGKQHTFIGVLDIYG

SEQ ID NO: 2350 - DNA, 6368 bp, Mus musculus
cagtccgggcgccagagccctcgggggaagggagccgtggcactcgggaaaacttctgcacaagatggccaggcgctgagtgcctgggcgcgcacagtcccctgcagcaacagcagcagagaggaggtccatggcggtggccgagctctacgcgcagtacaacagggtttggatcccagatcctgaggaagtttggaagtcggctgaaatcgcaaaggactacagagcgggtgaccgagtcctcagacttctgctggaggatggcatggagctggaataccctgttgacccagggtcactgcctccgcttcggaaccctgacatcctggtgggtgagaatgacctcacagccctcagctacctccatgagcccgcagtgctgcataatctcagaatccgcttcgcagagtccaaactcatctacacctacagtggaatcattttggtggccatgaatccttacaaacagctaccaatatacggggatgccatcatccacgcctacagcggacagaacatgggtgacatggacccacacatctttgcggttgcagaggaggcctacaagcagatggccaggaacaatagaaatcagtccataatcgtgagtggagaatcaggagccgggaagactgtctctgcacgctatgccatgaggtacttcgctaccgtcagcaaatcgagcagcaatgcccatgtggaggacaaagtcttggcatccaatcccataactgaggctgttggaaatgccaagaccacccgcaatgacaacagcagtcggtttgggaaatacacagagatcagctttgatgagagaaaccagatcattggcgccaatatgagaacttacctcctggagaagtccagagttgtctttcagtcagaaaatgaacggaattaccacatcttctaccagctttgtgcatccgcacagcagtcagaatttaaacaccttaaactggggagtgcggaagagttcaactacacaagaatgggaggtaacactgtcattgaaggtgtcaatgacagagctgacatggtggagacccagaagaccttcacactactgggtaagagacaccaaggattcaagaaagattttcaaatggatgtttttaagatcctagctgccatcctgcacctgggcaatgtgcaggtcaccacggtgggcaacgagaggtcttcagtcagtgaggatgacagtcacctgaaggtgttctgtgagctcttgggcctggagaccagcaaagtggctcagtggctgtgcaacagaaaaattgtgacctcctcggaaactgtggtaaagcccatgaccaggcctcaggccatcaacgccagggatgcgctggccaaaaagatctacgctcacctgttcgacttcattgtcgagcaaatcaaccaggcgttgcacttctcaggcaagcagcacacttttattggtgttttggacatttatggttttgagacctttgatgtaaacagctttgaacagttctgcatcaattacgctaatgaaaaactacagcagcagtttaacctgcacgtctttaaacttgagcaagaggaatacatgaaagaggacatcccctggactctgatagacttctatgacaaccagcctgttattgacctgatcgaggcaaaaatgggcattttggagttgctggatgaagaatgcttgttgcctcatggcaccgatgaaaactggcttcaaaagctgtataacaattttgtcaacaagaactcgttattcgagaagcctagaatgtcaaactcatccttcatcatccaacattttgctgacaaggtggagtaccaatgtgaagggttcctggagaagaacagagacactgtctatgacatgctggtggagatcctcagagcaagcaagtttcatctctgtgccgccttttttcaagaaagccctgttccgtcttctccctttggggcgatgatcacagttaaatctgcaaagcaggtcatcaagccgaacaccaagcacttccggaccactgttgggaacaagttccgcagctctctgtacttgctcatggaaaccctcaatgccaccacaccccactacgtccgttgcatcaagccaaatgatgagaaaatgccctttgactacgaggccttaacacattataaaattactttaaggtttgactccaagcggattgtccagcagctgcgagcctgtggcgttttagaaacgattcgcatcagtgcccagagctacccttccaggtggacatacctcgagttctatagtcgctatggcatcctcatgacccagcaggagctgtccctcagtgataagaaggaggtgtgcaaggtggttctgcacaggctcatccaggattctaaccagtaccagtttggtagaaccaaaattttcttcagagcaggacaagtggcttacttagagaaactccgcctggataaactgagacaggattgtattatgatccagaaacacgtgcgaggctggctgcagaggaggaagttcctcagggagagacaggctgccctgacaatccaacggtacttccggggtcagcagacagtgaggaaggccatcactgccactgctttgaaggaggcctgggcggccatcatcctccagaagtattgccgaggctacctggtccgtaacctgtaccagctgatccgtgtggccaccatcaccatccaggcacacaccaggggcttcctagccaggaggcggtaccggaaggagcacaaggcagtgatcctgcagaagtatgcgagggcctggctggcccggcgcagattccagaacatccgcaggttcgtgctcaacattcagctgacttacagggtccagcgcttgcagaagaagctggaggatcagaacagagagaaccacgggctggtggagaagctgaccagcctggccgctctgcgggttggcgatctggaaaaggttcagaagctggaagcagagctggaaaaggcagctacccaccggcacagctatgaagagaagggccgcagatacagggacacagtggaggagaggttgtcaaagctgcagaagcacaatgcagagctggagctgcagagagagcgagcagagcagatgctgcaagagaagtctgaggagctaaaagaaaaaatggacaagctcaccaggcagctgtttgatgatgtgcagaaagaagaacagcaaagactagttcttgaaaaaggttttgagctgaaaacacaagcctatgagaaacagatagagtctctgagagaagagattaaagccctcaaggacgagaggtcgcaactgcatcaccagctggaggagggacaggtcacctctgaccgcctgaagggggaggtggcccgcctaagcaagcaggcaaagaccatctctgagtttgagaaggagatagagctgctgcaagcccagaagatagatgtggaaaagcacgtgcagtcacagaaacgggagatgagagaacggatgtcagaggtcaccaagcagcttttggagagctatgacatcgaagatgttagaagcaggctctctgtggaagatctggaacatttaaatgaagatggagaactttggtttgcctacgaaggactaaagaaagcaactcgagttctggagagccatttccagtctcagaaggattgctatgaaaaagagattgaaggtctgaacttcaaagtcgtgcacctgagccaagagatcaaccacctgcagaagctgttcagagaagagacagacatcaacgaaagtatccggcatgaagtcaccaggctgacatcagaaaacatgatgatcccagactttaagcagcagatttcagagctggagaggcagaagcaggatcttgaatcccgcctgaaggagcaggctgagaagatagaaggaaagctggaagagccgttcagccacctgaaccgaatccgagaagaggagagaatgcagggcagggccgtggaagcacagagtgagatgcatccagaagggaaggagaggctggtgggtgcgatccacgaaccgcatgaagccatcaagttcccaaagaagcaaccagaagctgaggaggaagtcgagagtattctccaacaagaagcgtcccggctctctttggaaaagagggatctcgaggaagagttagacatgaaggacagaatgattagaaggctacaagatcaagtcaagactctgaccaagacgattgagaaagccgaccatgtgcacctgccctcgggatccagggagtacctggggatgctggaatacaagaaagaagatgaggggaagctcattcaaaacctcattcttgacctgaagccccgaggtgtggtggtgaacatgatcccagggctgccagctcacatcctgttcatgtgcgtgcgatacgcggactccctaaacgacgccaacatgctcaaatccctcatgaacagtgctattaacggcatcaagcatgtggttaaggaacattttgaagatttggagatgctgtccttctggctttccaacacttgccattttcttaactgcctgaagcagtacagcggagaagaggaattcatgaagtataacagcccacagcagaataagaactgcttgaacaattttgatcttacagaatacagacagattctcagtgatgtggccatacggatttatcatcagttcatcattgtgatggaaaacaacctccagccgataatagtgccaggcatgctggagtatgagagcctgcagggcatttccggcctgaagcccactggtttccggaagcgctcatccagcatcgacgacacagatgcctacaccatgacgtccatcctgcagcagctgagctacttctacagcaccatgtgtcagaacggcctggaccccgagattgtgaggcaggcggtcaagcagttgttctacctggtcggggcggtgaccctcaacagcctcctcctgcgcaaggacatgtgctcctgcaggaaaggcatgcagatcaggtgcaacatcagcttcttggaagaatggctaaaagataagaatgtgcagagtagcttagccaaggagacactggagcccctctctcaggcagcctggttgctgcaggtgaagaagaccacagacagtgatgccaaggagatcgcccagtgttgcacttccctgtctgctgtgcagatcataaagatccttaattcatacacacctatagacgacttcgagaaaagagtcaatccatcctttgtccgcaaagtacaggctcttctgaataaccggggcgactcggcacagctgatgctggataccaaatatctttttcaagtcacatttcctttcaccgcctcaccacacgccctggagatgacccagatccccagcagcttcaagctcggctttctccggagactgtagccagagagaagatggacgtgagttccctggagtcctgagtgcaggtgccacggagggatgcagttattcaccagagcattgtgatggattgcaatttgaggaaaaaccacgccccacctgtctcccatgatgctttgcaaccggctgggctgggaaaggctcttgcttctgatctcaagtggctattgttgcaattcctgaaggctcagttttgttcctggtgcctttgttttgtggcagggacctcccctcacccacatatatacaggagtaaaatctagaggcaccatgactcccccgatttctagggttcccgtgaagtgcagagacatgtatgaagccacagttgagttccatgcctacaccttctaggaaagaattccacgtggccactggaacaaagtctttttgccccatccctgttggcaggaagggctcgttagctcctcctactaaagacgactggattagaaaactactccctttagaaactctaagagggtattcagtctaagagcaggtcatggtaacccataactagaatcccagcactcaggaggatgagaccagagatttatctcgagttcagtgtcagccttgactacagagtgagaacccatctcagagatagatagatagatagatagatagatagatagatagatagatagatagatagataaatagataaatataaataaataagagcattttatttatctattttatgccatttatcttttttctgaaaattttaaaacttgttattagccaacatagttattataatctttcatttaatttttaaatacagctatttcttttaaaactacatttatctctggggtcagaactcagtggtagagcagttggccctgggtttggccccagcaccacacatgcacacgtgtgcaacttaagtttttttttcctctttctaatcagtgttctaatatgctttttaaat

SEQ ID NO: 2351 - protein, 1736 aa, Mus musculus
MAVAELYAQYNRVWIPDPEEVWKSAEIAKDYRAGDRVLRLLLEDGMELEYPVDPGSLPPLRNPDILVGENDLTALSYLHEPAVLHNLRIRFAESKLIYTYSGIILVAMNPYKQLPIYGDAIIHAYSGQNMGDMDPHIFAVAEEAYKQMARNNRNQSIIVSGESGAGKTVSARYAMRYFATVSKSSSNAHVEDKVLNPITEAVGNAKTTRNDNSSRFGKYTEISFDERNQIIGANMRTYLLEKSRVVFQSENERNYHIFYQLCASAQQSEFKHLKLGSAEEFNYTRMGGNTVIEGVNDRADMVETQKTFTLLGKRHQGFKKDFQMDVFKILAAILHLGNVQVTTVGNERSSVSEDDSHLKVFCELLGLETSKVAQWLCNRKIVTSSETVVKPMWQAINARDAKKIYAHLFDFIVEQINQALHFSGKQHTFIGVLDIYGFETFDVNSFEQFCINYANEKLQQQFNLHVFKLEQEEYMKEDIPWTLIDFYDNQPVIDLIEAKMGILLDEECLLPHGTDENWLQKLYNNFVNKNSLFEKPRMSNSSFIIQHFADKVEYQCEGFLEKNRDTVYDMLVEILRASKFHLCAAFFQESPVPSSPFGAMITVKSAKQVIKPNTKHFRTTVGNKFRSSLYLLMLNATTPHYVRCIKPNDEKMPFDYEALTHYKITLRFDSKRIVQQLRACGVLETIRISAQSYPSRWTYLEFYSRYGILMTQQELSLSDKKEVCKVVLHRLIQDSNQYQFGRTKIFFRAGQVAYLEKLRLDKLRQDCIMIQKHVRGWLQRRKFLRERQAALTIQRYFRGQQTVRKAITATALKEAWAAIILQKYCRGYLVRNLYQLIRVATITIQAHTRGFLARRRYRKEHKAVILQKYARAWLARRRFQNIRRFVLNIQLYVQRLQKKLEDQNRENHGLVEKLTSLAALRVGDLEKVQKLEAELEKAATHSYEEKGRRYRDTVEERLSKLQKHNAELELQRERAEQMLQEKSEELKEKMDKLTRQLFDDVQKEEQQRLVLEKGFELKTQAYEKQIESLREEIKALKDERSQLHHQLEEGQVTSDRLKGEVARLSKQAKTISEFEKEIELLQAQKIDVEKHVQSQKREMRERMSEVTKQLLESYDIEDVRSRLSVEDLEHLNEDGELWFAYEGLKKATRVLESHFQSQKDCYEKEIEQFKVVHLSQEINHLQKLFREETDINESIRHEVTRLTSENMMIPDFKQQISELERQKQDLESRLKEQAEKIEGKLEEPFSHLNRIREEERMQGRAVEAQSEMHPEGKERLVGAIHEFAIKFPKKQPEAEEEVESILQQEASRLSLEKRDLEEELDMKDRMIRRLQDQVKTLTKTIEKADHVHLPSGSREYLGMLEYKKEDEGKLIQNLILDLKPRGVVVNMIPGLPAHILFMCVRYADSLNDANMLKSLMNSAINGIKHVVKEHFEDLEMLSFWLSNTCHFLNCLKQYSGEEEFMKYNSPQQNKNCLNNFDLTEYRQILSDVAIRIYHQFIIVMENNLQPIIVPGMLEYESLQGISGLKPTGFRKRSSSIDDTDAYTMTSILQQLSYFYSTMCQNGLDPEIVRQAVKQLFYLVGAVTLNSLLLRKDMCSCRKGMQIRCNISFLEEWLKDKNVQSSLAKETLEPLSQAAWLLQVKKTTDSDAKEIAQCCTSLSAVQIIKILNSYTPIDDFEKRVNPSFVRKVQALLNNRGDSAQLMLDTKYLFQVTFPFTDHALEMTQIPSSFKLGFLRRL

SEQ ID NO: 2352 - DNA, 3198 bp, Mus musculus
gccatgtgagaactgctctctctgagcatgctgggatttcttgagaccactacaaaggtcttcagatgaagggggaggggatggaatgtcaacgaatcccagtgtctccgctggcctctcacacagcccatgtactccacacgctgaacaaggagatgggtgtcttggagagcataaacattcaggctcaagcattaattaatctctctcctctgaagatgatcccagactttaagcagcagatttcagagctggagaggcagaagcaggatcttgaatcccgcctgaaggagcaggctgagaagatagaaggaaagctggaagagccgttcagccacctgaaccgaatccgagaagaggagagaatgcagggcagggccgtggaagcacagagtgagatgcatccagaagggaaggagaggctggtgggtgcgatccacgaaccgcatgaagccatcaagttcccaaagaagcaaccagaagctgaggaggaagtcgagagtattctccaacaagaagcgtcccggctctctttggaaaagagggatctcgaggaagagttagacatgaaggacagaatgattagaaggctacaagatcaagtcaagactctgaccaagacgattgagaaagccgaccatgtgcacctgccctcgggatccagggagtacctggggatgctggaatacaagaaagaagatgaggggaagctcattcaaaacctcattcttgacctgaagccccgaggtgtggtggtgaacatgatcccagggctgccagctcacatcctgttcatgtgcgtgcgatacgcggactccctaaacgacgccaacatgctcaaatccctcatgaacagtgctattaacggcatcaagcatgtggttaaggaacattttgaagatttggagatgctgtccttctggctttccaacacttgccattttcttaactgcctgaagcagtacagcggagaagaggaattcatgaagtataacagcccacagcagaataagaactgcttgaacaattttgatcttacagaatacagacagattctcagtgatgtggccatacggatttatcatcagttcatcattgtgatggaaaacaacctccagccgataatagtgccaggcatgctggagtatgagagcctgcagggcatttccggcctgaagcccactggtttccggaagcgctcatccagcatcgacgacacagatgcctacaccatgacgtccatcctgcagcagctgagctacttctacagcaccatgtgtcagaacggcctggaccccgagattgtgaggcaggcggtcaagcagttgttctacctggtcggggcggtgaccctcaacagcctcctcctgcgcaaggacatgtgctcctgcaggaaaggcatgcagatcaggtgcaacatcagcttcttggaagaatggctaaaagataagaatgtgcagagtagcttagccaaggagacactggagcccctctctcaggcagcctggttgctgcaggtgaagaagaccacagacagtgatgccaaggagatcgcccagtgttgcacttccctgtctgctgtgcagatcataaagatccttaattcatacacacctatagacgacttcgagaaaagagtcaatccatcctttgtccgcaaagtacaggctcttctgaataaccggggcgactcggcacagctgatgctggataccaaatatctttttcaagtcacatttcctttcaccgcctcaccacacgccctggagatgacccagatccccagcagcttcaagctcggctttctccggagactgtagccagagagaagatggacgtgagttccctggagtcctgagtgcaggtgccacggagggatgcagttattcaccagagcattgtgatggattgcaatttgaggaaaaaccacgccccacctgtctcccatgatgctttgcaaccggctgggctgggaaaggctcttgcttctgatctcaagtggctattgttgcaattcctgaaggctcagttttgttcctggtgcctttgttttgtggcagggacctcccctcacccacatatatacaggagtaaaatctagaggcaccatgactcccccgatttctagggttcccgtgaagtgcagagacatgtatgaagccacagttgagttccatgcctacaccttctaggaaagaattccacgtggccactggaacaaagtctttttgccccatccctgttggcaggaagggctcgttagctcctcctactaaagacgactggattagaaaactactccctttagaaactctaagagggtattcagtctaagagcaggtcatggtaacccataactagaatcccagcactcaggaggatgagaccagagatttatctcgagttcagtgtcagccttgactacagagtgagaacccatctcagagatagatagatagatagatagatagatagatagatagatagatagatagatagataaatagataaatagataaatagataaatataaataaataagagcattttatttatctattttatgccatttatcttttttctgaaaattttaaaacttgttattagccaacatagttattataatctttcatttaatttttaaatacagctatttcttttaaaactacatttatctctggggtcagaactcagtggtagagcagttggccctgggtttggccccagcaccacacatgcacacgtgtgcaacttaagtttttttttcctctttctaatcagtgttctaatatgctttttaaattttttttcacgaaaaaaaaaaaaacaacaacagaagatatggggaagctcttccttttgagaaatccacttttcccaggttttgtgagaactagttattccttccctcaaactgttttccttcccttcagagaactgagtcctctgatgagcactcctgacccagagctgagacccatcactctgtgcacccctagcaacctgacaaccctccagtctgatggtcacaggcagtagctgtgacaccacagaatggtcctctctggggcgaccggttgattgttcagtaccacctactaaacgtgtagtcatcctactgacatgatggctttccaaactgttcccaagtgctgaaaatagaactttataatacttaaataaaataaattattgagc

SEQ ID NO: 2353 - protein, 580 aa, Mus musculus
MKGEGMECQRIPVSPLASHTAHVLHTLNKEMGVLESINIQAQALINLSPLKMIPDFKQQISELERQKQDLESRLKEQAEKIEGKLEEPFSHLNRIREEERMQGRAVEAQSEMHPEGKERLVGAIHEFAIKFPKKQPEAEEEVESILQQEASRLSLEKRDLEEELDMKDRMIRRLQDQVKTLTKTIEKADHVHLPSGSREYLGMLEYKKEDEGKLIQNLILDLKPRGVVVNMIPGLPAHILFMCVRYADSLNDANMLKSLMNSAINGIKHVVKEHFEDLEMLSFWLSNTCHFLNCLKQYSGEEEFMKYNSPQQNKNCLNNFDLTEYRQILSDVAIRIYHQFIIVMENNLQPIIVPGMLEYESLQGISGLKPTGFRKRSSSIDDTDAYTMTSILQQLSYFYSTMCQNGLDPEIVRQAVKQLFYLVGAVTLNSLLLRKDMCSCRKGMQIRCNISFLEEWLKDKNVQSSLAKETLEPLSQAAWLLQVKKTTDSDAKEIAQCCTSLSAVQIIKILNSYTPIDDFEKRVNPSFVRKVQALLNNRGDSAQLMLDTKYLFQVTFPFTDHALEMTQIPSSFKLGFLRRL

SEQ ID NO: 2354 - DNA, 124018 bp, Homo sapiens
  misc_feature (1)...(124018): n = A, C, G or T/U
gtattacctaacacaattaaagttcagagatatatccaggtgcccaaacattgacatcagggatctccttttctttccttacttttggcttcattcttagtcatgttctccctcaagtgacaaagacggccctcagtagtgtttggcttcattctatggctctgccttcagtaattctcagtaaggcatttcaggatggagtctcagtggcttaagtcctacttccatcctcagaataatcactgtgtccagatgagtgctctgactgtcctagcctgacataccccccactgaaactaaaaattgggtaattcacagaaaacataggattgattaggtggtagtgggagttcaccagaggaaagacagagtatagttcacagaggaaatgaaagcaatgcatgtctacagtaatgcattctcctgaatgggaaagaaagggacacgaattgtgtgcagcactgggagtgtgccatccatgtgaaagtgtggagctgctgggtgggtttcctgggtcttagcagtcagcataagtgcacaaagaagtaagcaaagtgttacacaacaagaattttgaaatcacatttaccaccccggaaagggacctgggaagacatgtgatttgttcacattgatcaccttgctactgaaaccaaaatatgatggacattattcaaaaggagagaaataaaacctgccatacagacctcgttagcaccatgttggccagctatgggcagttctggtcattgggtttcaaacaaaacacaagggaatataagaggttcagaagagaataagagataactgaaggaaaaggatactactcataagaatggtttgaaagtcctgagacaattgggcctagagaaatgaatgccaagaaggtaagaatgtgggcaagtgctaaaaaattatgcttggttgggccaggtgcagtggttcacacctgtaatcccagcactttgggaggccgaggcgggcagatcatgaggtcaggagatcaaaaccatcctggctaacatggtgaaaccccgtctctactaaataatacaaaaaattagccgggcgtggtggcgggcgcctgtagtcccagctactcaggaggctgaggcaggagaatggcatgaacctgggaggcggagcttgcagtgagccgagattgcgccactgcactccagcctgggcaacagagtgagactccatctcaaaataaaagaaaaaaaaattatgcttggcacagataaggaaaacatgaactacttaccaaaacttaaatatggtaaacagacattttgaaacttcagcagttactggaaaagaaagaaaatactagtttatgttgtcaaccatgtatatctgaagctcatttcctaagagtctatattatcaagaaagctaaatgaatttgaagagagtttggtcaatgctacttgtgaccaaaaaaaatttctactgagaagatctgggttgtatcaaatcttcaggttataatctaggaagacaaatggtttcttttcacatgtacacccatggtctgcgaaaaataggtctccgggctgaatggcctgtgtctaggatgaccctagctaggatggtgattactgtgcaaaagaatggggctccttttggagggaagtaagaagctgttaaaaacaacctcatgaaaacagaagggagggaggaaaatacaggtaggaatggggttggtcaacagaagtgagatgggcaaagaaagacaggccaaaagcccatggaaaaccattcttgagttgacattaaatacaacaggagaaatatttctcacatttcaaaagtagcttttaggaattccacttctgacatgatagcatgaggagctttgcagacaactcccaagggaaaccagtgaaaccagtgagaattattttaaaaacaaaccaaacccccaattctttaaagtctctagaaatggtcctaagggcatacaccaaatgaagaagtgcttattcaagaaaacatactaaagcttgataaagagaatgagcttgttgtatctgaaccaagattcctccctccttccatcttccaggtcaatgagacaaaaactccactctagactggtatagccaagaactcagggcttcctctctgccagctcacagttggagggctgtcttcctgggaggggcaggatgtcagcacttctcatcctgctcccagccacctcttgcttaagctaagtttcaaataaatgcagtcaacaggtggggggggtcccttctacccagcccctactcatggctcacaggctctaccttggggacatcactgctgaaaatactgggaccccagtgcatcttgttcaggcttgtaaggtggtgctctcatcctgggaaaggccaaccaaaaagacctaaggccactatcccccatccaccgagcatttggctcccatcactcaaagagatgcaagccattgtcctcatccccagctccagaacaatggctcagagattttcaccaggagcagaagcaggctgtaaaacagaaagctccaaattacttcctaaaggaactgacttcatttgcaaaagagtgtggagaagttcaagcctaagggcgtttcaaaaacagtgaaggttgcagtgactggggattgggaggggattggtagattcattagagttatcggctgaactttaggctataactttcctggagagaactgggagaagagacagccaggaggagtccttgcaggatcagaacaagtctcaaacattgacctcaagaactatcctttcaaaggagcccaaaattgatcagatactgtctgtgaaacaatgtgttccttatagcattgttgaaaatcgtaattggtggagtttaacagctgaatgttaacacagtcaaagtgaagctagccaaaaccactgtcatcccaggtttagcaggctacactgcctgagaagcagcatcagaggcttcccactatggagtagtggaggagggccaaatagatcttattgaaataagccagctggtcactaaaacataaataagcccagtttatttacaaaaacaaggaccagtatgcagagctactacattatcagaaatatcttgattataaccaaaaaattacaagacatgcaaagaaacaggaaagtatgacttataagcagaaaaaaaaatcaggcaacagaaactgcttataagaataacaaggtgttagattaacaaagatttcagatcagccattataaatatattcaaagaactaaaggaaactatgattaaagaatacatttgatgaatgacaacaacaatacaaagaacaggagggaggaataggaaccttttgatattataaggtacttgtactgtaccttatacactgtaaagtgatatcatgttctgtgaagatgggcatggattcgttatcaatgtgtattgcaaactccagggcaaccactataaaaagtaaaaatagaagtataattaatatgctaagaaaagagaaaaaactgaatcacattaaatgctcaattaaaaccacaaatggcagaaaaaagagtggaagacaaaaaatagaaacaagaccaagggcaacaaatagaacagtaacaaatatggtagatattaatccaaatctatcagtagtctgtgtaaatgtccatggtctaagtacacaaattaaaagacagattgtcagagtggatcaaaacacaagacccaactatatgttgtctacaaggtgattctaaaattcaggtggaattgcaagggacaccaaatagccagaacactcttgaaaaacaatagcaaagttggatgactctaatttcaaggcttactacaaagcaacagcaaactagaccatctggcactgaaagtaaagatagacatagacatcagtggaatataatttagagtagggaaataaacctatgtgtttatgatcaattgatttcaacaagagtgccataaccattcgatggggaaagaatagtcttttcaacaaataatgttgacacaactgaatagctaatgcaaaataataaagttaggcctttatctcataccatatacaaaaaacaaacaaaactctgctggatgcagtggctcacatctataatcctagtgttttgggaggccaaggtacaaggatcacttgaggccaggagtttaaaactagccttggcaatgtagtgaccccatttctacaaaaaaaaatttatctaggcatggtggcatgcacctgaagttctagatactacagaggccaaagagaagaatcacttgagcccaggaatttgaggctgcagtgagctatgatcaccactgtgctccagcctgggtaacagagagagaccttgtctcaaacaaacaaaacaaacaaaaactcaaaatgggtcacaggcctaaatgtaagagctaaaactataaaacttagaagaaaacaaaaggataaatcttcttgactttcgattgacaaagggattcttagatatgacaccaaaagcacaaataacaaaagaaaaaataaaccgaacttcatcacaattgaaaacttttgtgcttcagtgaacactgtcgagaaaatgaaaaggcaacctgtataataggtagaaatatttgcaaatcatatatctgataatggagtcgtatctagaatatataaagaactcttattacttaataataaaaagacaattttaaaatgaacaaaggatctaaatagacatttctccaaagaagatacacaaaagcacatgaaaagatgcagatgcctggcatgagggaaatgcatatgaaagccacagtgagatactacttcacacccaccaaaatgcctagaaccaaaaagtcaggtaataacatgaattggcaaggatgtggagaaatcagaactctcaggcactgctggtagaaatgtaaaatggtgcagccactctggaaaacaatctagtagttcccccaacagttaaagaacagagttaccctatgacccagcaattccactcctggaaatacccaagagaaatgaagacatatatgttcatacaaaaacttgtacataaatgtttatagcaacattactcctaatagccaaaaggtgggaacaacccaaatattcattaattgattaatataatggaatgttacttaatccctaaagaatcactgaaaagttaactcaagaaatagagttctttttaggggggaaatttaaattatgcacttaataaaaactatcaccaaaaaattcaagaaaggggaaacagagggagaaaaatacatgtgccatatagaaaacaacaaatggcagacataaatccaaccatatcaaagactacaagaaatgtgaatggattacacaccccaataaaaaggcagagattatcagactggatttaagaaaaacaaaaacaaacaacaacaacaacaaaaacaggcacagtggtgcatgcctgtaatcccagctacttgagaagctgaggaaggaagatcactagagtccaggggttcaagaccaacctgggcaactgttctgtgtgggagacctgcgaggggagaaggcacacacaatacttttaagggtaaacaactttatcccatgtaaatggcaatgcagataataataagcagatgatataataagcaaattgatataataagcaaattgcaatgggaaggggagaaaggataagatatatatatatatttacactcaccagactatggagaattcaccaccagacccgtaagcaacagcctgggctccagagtcggccactcactggtgtagatgaggagaggtctcatgaagcttcagtgcagtctgggacccaagctctttttgtaacaagttgtttggcatgaggcccaatcaggaggccctttgcgactgggctcaaggaacccaaaaagtcaacttttttttttgcaattgttgtttttcaataactaacgtataggaatagattgaaatggggatttctccaaaaaagtgctggatgaatgccttaaggggctcacacaacctattctgggacttggtgaccattgtttgtgtccatgttcaatttgatatttaacttttcctccacagcaacatagcaagactccatctctaaaaaaaaaaaaaaaaaaaaaaaaaaggaaaaagaaataaataaaatggccaggtgtcaggtgtggtggctcacgcctgtaatcccagcactttgggaggccgaggcgagatcacgccattgcactccagcctgggcaacaagagctaaactctgtctcaaaaaaaaaaaaaaaaaaaaattccatatcctaaatgtcagagttctaactataacacatctagaagagaatctttatgagcttaagctaggcaaaaatttattagataacaacaccaaaagcatgatccacaaaattaaaaaatgataaattggacttcccccaaatttaaagtttttgtgctgcctaagacaccatgaagaaaatgaaaagacaatccatatagtgggagaaaatatttgcaaaccatatatcggtaaagggtttgtgatcaaaatgtttaaagatggtagattcaatacctgtatttactcaaccttcctcctgaaactccggtaagtaacaataaactcacaaaggaaaacagaatgaatgaggaatgacagcaacagcttggaagatgaaaaacagatggataaatgtcttttattttcacaagcaaagaaaactgaaacctaacccgggacaggcagaagcccagaagcaatccagtttgcactacataattccgaaaagctcaggaattaggttcagaggcagcaggtaacactgaaagtggcatgcagctgaaaacacaggaattggttgaaaatctgtttaaatagcagttcaagtggacttgaacagacatttcacaaaagagaataccaaagtggtcaatagtcatcatagaaataaatgcaacttggacccacagtgagacatcataacacactcatcagaaaggctattttttaaactgaccacatcaagtggtgaggatattaagcaactaaaagtctcacacactgctggtagaagtatacattgatataacaattttttacaaatctctttagcattatccgttaaagttgagcattacatacctgtgatccagcaattctgctctgtttatgtgcccaacaaaaatacatatatttgtgcatcaaaagacacatataaaatgttcatagcagcattattcatagtgggtgtaaactgaagcaaccgaaatatttatcaataggagaatgaataaattgtagaatatttatacaatggaatactactagacaggaatgaaagacctcaaaccgcagctacatgcaacaagatgaataaataccatgtaaaaagccaaatgcaagagttacacatgtgattccatttattaaaaacatccaaaacaggtaaaacgcatctatggtgatacaaatcagaacagtggttatctttgagagaaaatgatttgaagaaacagagaaagttttgggatatcggtaatgttctacgtctggatctgggcggtggttactttggtgtgttgatgtgttccatgaataagaatatattgagctgtacacttattatttgcacacttttctgtatataattttattcttcaataaaaattttctttaaataaaaaaggcagctagattctctttttaactctgagcaatcaggcagctgtcactactcaccttatagattttctttttctttatacaaaatagaattatttgggcaataatataaataattttgtatataaataaatgcaaaattaaatttaccatgatcctctctttgtggcatttatcattattgatccatgccaggcctctctttatattttttgatcccctttttgaaatctccgattccatttctctccctcataggtatccactcttgcatatttaatgaatgactttgtaatttatcctccttacctctattcacacatacttgtacccatgaacaatattcagtattgcagtttttgtgagtttttaaatattaaagacttgggctagacatctattcaacattgttttttatttctgagtcaagtagatcatgtctattcctactaacagctgtagagttttacatgtatatactatttctttttttatttttctctgctgtctgccatgtatatactattttatttattcccctattgatatttagatgcttccaactctttgataaataactatgttgtgatgaacatctacttaactgtctctttgggtgactgtgagaatttttctgcctacatttattttcataactattctcaaattgctctccaggatggcagtatattcccaccagttatgtaagcaaaaaaagtttttattttttttatttattttttttttttttttgagacggagtctcgctctgtcgcccaggctggagtgcagtggcgcaatctcggctcactgcaggctccgccccctggggttcacgccattctcctgcctcagcctcccgagtagctgggactacaggtgcgtgccacctcgcccggctaattttttgtatttttagtagagacggggtttcaccgtgttagccaggatggtctcgatctcctgacctcgtgatccgcccgcctcggcctcccaaagtgctgggattacaggcgtgagccaccgcgcccggccaagtttttattttctcacatcctaggcagtatctgagattgtctaacctaaatgtttttgccaatatgatgggtaaaaagcaatatctcattgttgttttcatttgtatttatctgattactgctaaagttgacatctccttatatgctaacaagccatttaagtgtccccatctgtgaattgcctattaatttttgtcagttttaaaaattggatttcttttctttaaccgattaacaattcttctatatggaaactactataacccaacattttaaagatattatccctcttttattcctaataatttcccggttttaagttttaatcgtgaatccatctggagcttatttttggatgcagtgtttgccacggatctgcttttattgtttttccatataacgggcccatctaataaatattattttatttccctatctggtccttaaggctaccgtataatgtagggccctgctggggggctccagcatgttccattactcacgtatccgttctcacgcaagtgtcacactgttttaatgactactgctttgttatgtccctaaatatatggcaggacaaatctctcctctttgagaattgtcttagttatacagggcttttattctatatgaaatatagaatcattgtacaattctccaaaagttctgtaggattctgacgccaatatattaggcatatatattgatttgggtagaagtgacaccttgaccatattaaatattcccagccaggaaaatggcatgtctcccgtttacctgggccttcttttaagctctttaagagaattttaaacattttctccacaaaggccaagggcatttttgcgagtgtaatctctggatactttatattttcactaatattgtaaatatcttgtattgcatagacaatgctcatataaaggaccattacttatttttgtatttgattttgaatacgatgaccttgctggactcttaacacatttctttgtgttcagtacgttgattcccttgggtcttccatttaaatggtcgtatcctctgctctttgaggagctaacactcgggccgggcagcctccggatgcatctgttcctgcctggcagcgcgccccgggccccaaccttctccacccgcgctcccgccaggtgcagccgcccggccccggccaatggcagcgccgactagccgggccaagcttggagggaccaatcccgccgctgccccctcccctcgccgccaactcgggaacgggaacaggaggccgttggaaaactttgggcaagatggcccggcggtgatttccgcggcggtctctcctgcgcccggcctctgcggcgcaggcccagcccccgaacctcgcacgttcggcagccccggcctggccccggcccctcctgcccatggcggtggccgagctgtacacgcaggtaggagggtccgctgggctcctgggagcgctgtgggggagccggccctgctaacgctgactcgacctggcgcccgggccacacctgccacacctgcgcacctgacacggcagggcgggcgggcgcgcgctgggggccgcggaggcgccgcggaggggccacggggaccggggacacgagcgagcgtcgcccctccagggccccggcgtgctccgtccctgcccgcgggtaagccccctcctggctccgctgcgcctgggtgccctgtgggtgggaagaccctgtgggaggggccgccccctccgccgctccggcctcggggcctagaatccccagtgcccaggggtcgcgcgtgcgtccccatctcccgggactggagcgcctcggtcccttcctaccacaccacgggtggaatcagagttgcccatgcggacgtaggaagctgagacgccggccagtctcctggcccctcctgggacccccttgaacgagctggcatagaagcttatggccgcagtgttcgggctgctttctagaattctgtgtcttcaaagtgcgtgaacgtgcatgtaggctcatcagaagctgaagcagcctgggtcacaggcttgagggcactgcagtggcaccaagcgcttggggagcccaggggccacgaggtgcagtcgtaggctctttgcctaacatctgtactgttagcaacagtacaaacaccacagtttctaaagcgcctttcatataccctgactctgggaaacactagagcattcctcagaagcttcctttctgctggctggggctccacctcttacctcggaagggcagcgttcccnnnnnnnnnnnnnnnnnnnnacttatatatggacagctgatttgcaaccaacgtgcacagactatgcaaagaataaaaatagctatttctgcaaatgggattgaagcaattgggtcatcatgtgcaaaacaataataacataatagctttgacccattccatgcaccatgtgcaaaagttaactcaaaatggatcatagacctaattctaaagcctgaaactataaaacttctagaattctgtgtcttcaaagtgcgtgaacgtgcatgtaggctcatcagaagctgaagcagcctgggtcacaggcttgagggcactgcagtggcaccaagcgcttggggagcccaggggccacgaggtgcagtcgtaggctctttgcctaacatctgtactgttagcaacagtacaaacaccacagtttctaaagcgcctttcatataccctgactctgggaaacactagagcattcctcagaagcttcctttctgctggctggggctccacctcttacctcggaagggcagcgttcccacatatgccccaaaccctctgagatgggcttgggtaattatttggataaagagtgtgacagtgttagcacttttgaaaaaaaaaaatccatttgaatagccataaagcctgatcctcctatacaccagttggggaaatctagagacctcagtattcagacgagtggaactagaatccatccatttccccggacacatgctctagctttctactttaaaagatgcttttgctgtagatagaaaagatagttatttaaaaaatcatgtttcaatggtttaagcaaacgtttttcttctactttgattacttagtaacagtccggacacaaagcaaccgaactgtagtttctcctctattgcatctccattaactggagttctaaatggacagtgtttgaattgccctagttttgttctagaatattttcaccagtgagactgtgagccctcagacagccaacagcgcttcttcagccttcagtttactggaagtgaaagaaaagtcttggactagtcttcgacgatactttggaggacagagaaaaatgctgctgctgaacctatttgaggtgacagtatttccagaagcagaaacacacaggtgcaagcacccctatttttaggtgcctcaaacctcagatatttattaaatgtctagtaagtaccaggcacaatgtaagaaaactgataggaaggagtttaaaggtacaagcttggagggaatgagaatctgagaatcccagagactgacgcagcctgatggccattcccactgaccttgtgtccacgtagacacctgtgttcctaggctgccacctcccttcctggtgggcagttagcccccattttgtctgttctggaggtgtgaaggggagggccatggcagccagagagcgaggtcagggctttattccccagtgtgggttttgagtgggggctggcagaatcaagggtggtgtgttaggactgttagatttgttatgtatgccagcagcgcccttgggctgtggaggagagaggccggggtcacgtagctgaattctcaggtcattccagctgttggaaaagaattagagctgcagtgttggccatggagggtggaggcaggtgaggctgagaggctggactggggagtggggtgggggttgaagggaccagccaaggatgacatttgaggttagagtctgtatgagagacagcagggtggtgcccttgagtgaattaaggatgtggcatgaggaggaaatatttcttaagaaagtcatcaggcaagttctgtatttgcaggggttgaaggggtgagggggcttccaagggaaggtgccttgcagggtgggaggtgtcagagggaggggatgggccctgccgagggtcttctgcccagaggtggtcactgaagccaacaagacactgagggtctcaccaaggtgggagaaggcagacagagaagagggtgagggacaggccagcggggaatgcatctgtgcaaggagtgagaggaagcagaagggctgagatggagccatccagaggaggagctaacaggggagctggaagccaccctgtgggaacagggaagagggaactccaggagaagtcttggtgaggggagcaatcgctgccaggtgaggtgtaaaatcatccatctcttttgaaaagctacaggtgccaagccttagaaatgttcagagcagcagttcccctatttgaaatctctcttaagaagagccggtctggcattctctgctctaccacctctagaggctcccattgctttcagactcactgaccagccacgaggtcctgcctctctccctgccttcctgctcttacctggctcatgctctgccagactccttgccattccctcaatgccttgcttgcacgttgccactgcgtgccttggcacacgaactccacctgtctgagcctctgtctgtcacctttgctcatggcacctgcaccttccaccttcaatttgagcaggacctcttctgagaaagcctctgcagctagcccctccacacggtgccttccatattgcctggtaacagctcgtgaactctgtgtctccactattgaccaagagctttcagtgagcaggggacagtgggagcttcataaatgtttgatgtgcacctgtgtgcatgactgaacgtttttgcttacagaaatagctaggaccatggagacgatgatatggatgatgttatttttatctctatgtgctagatgccatcctcagagtttcatgtgccgcctctcatttaatctggataaacaactctgtgtgttagatgatctcacacttttagaaatggctcaggtcaggtaagttgctaaggtaacatacaagtgatggagccggagttgaaaacctatgttcttagtgtctctcactaccaccaccttggttcaaccgcctttattatcttcctcttcttcaagggatctgaccttttccccgcacacagtgggcttgtgagaagttcatccactttctacctacctctcctgacacctgcttatttgtatttttccttataataactaaattggaaccaatcccagtgtccagcaagaggggtaaagttaagtaaattatggaagattcacatggtaaaacagcatgaagccattaaaagtactatttctgaagagttcataacatgaaaacatggttatgtgaaaaatggggcacaacagtttatatactgtatgaagataaatataaaatatgcggccgggtgcggtggctcacgcctgtaatcccagcactttgggaggccgaggcgggcggatcacgaggtcaggaggtcgagaccatcctggctaacacggtgaaaccccgtctctactaaaaatacaaaaaaattagccaggcgtggtggcaggcgcctgtagtcccagctactcaggaggctgaggcaggagaatggcgtgaacccgggaggcgaagcttgcagtgagccgagatcgcgccgctgcactccagcctgggcgacagagcgagaccctgtctcaaaaaaaaaaaaaaaaaaaaaaaaaaaaaaaaaaaaaaaaaaacataaaatatgcaaacaaagaaaaaagaccacacatatcactgcctaaagattggacggtctttctttctagtagctgcagagaagtcaacaaggatgaaggctggggatgggttgttaggtttggccgctagttttggtccctggcgtcgtttctgtttgggtagaactgtgaaggggaaagggaaagtctgacatgacccgtgaaagggaggaaaccagcagaggactgcagtttgaagacataagaaaggcaccaggcatgggttaacctcagaaaggagtgagggcctgaggccacagtggcaggagttgaaggcacagagatactgacagagaaggaagaaagcccagagagcttgacagctgctgagcaggaagggtgggtaggacagacggcttgaggagagtgacagtgccaccaaccatttctctgacagcatcattccagaccctcagcatccaggccaccttcctctgggtgaattttcacaccttgatgcccattttagtggcactattctctagccttgatctgctcagccatgagtacggtgcaacttcttgtgagcatccctcagtgtatcctggcattatgttagtgctttaagcagagctggtacatgctctgcccctggtgggtcaaatcaagtcctggtcctgccccttactaactgggtgacaccaggcaagttacttaacctgagtttccacaccagtataatggactgaatcatgcttaccagctgaggaggtcactatgaggattaatggcgtgtaaaatccttagcacagcacctgacacataatgcttaataaagattactcaaatactgatgctattataatacagttgattttttttacctaaatacagactttacatttatccctataaaattttctgttttgtttagtgcccagcgtttctgtagcttgtaaaaaccttttgaatcttgatcatctttagctaatcaatcatttcatctgcttgtttgatacatgtgttttgttttttcatctacgatactggtgaaagtgttgaatgaaaggggaggcggtagagctctgtggcatgcctctggagaccttttttttttttttttcctaaaggttgctcttgctcattaattagaactcaggttatgactgtgtagtgacaggttcactacagtcattccaccatctgtttctttcacttgtgcaagaggaactcacaaatatcttcaaagttctgctgaaactcagatgtgcaaggtcaaaagaagtgtcttgactagcagtccagggcccctgtctaaaatgaggtcaaagttcagcgtaacgattttttttttaatttggctaattctaaatagtttttagacttctatataccattaacaactctggaaaattaaatgtatccattgtattatgtatgggtagttcaaagagaaaaaaagggatgaaaagactgaaatacttagtctttaattggtgcaactgaaccactgggaatttgaatttttgttcaaaagttgtttatggagtgctagttatgggaagcctttgcattggattccaagcacaaagaccaggctcttaaagttcaaatgccagtgggggagatgggaggcagcctagatacctgggggaggagcagagagcgctcaagggaagcatccagctctgctagatggcaagtggcaaggagagtgccaagatgaggagtgtctccagctactccagactgttcagagctgtttgctcttggatggggagaggatgggtggggctagggtggaaggaacagaagtacacagcagaaagccaaagaaggcctgccatgttccagaaagtgctagtggttttgggtggccacaggcagagggtggattgaaaagagggtgaggcctgagcaggaaattggccagaatgctggttgcccaggcctggctcttcctcaaaacccatgtgggggttgattttcaaagcttttctcttgccgggccccacccacaggaattccaatcaagtacggatgagagagtctgtctgcccaaagaaacctcgtgctcagcctggctgaggaagcctccgggggctgctgcaccagtcaagagaggattggtgggggtagggttgggggctgacttatggccatggcaagggggctggtaggcaggggcggacaggagagggcttttaaaaggcagtcttttctagcacctggtgactgttgggctgttggggtggagacacagaggggtgcccagcactgtcccaggcttctgacatgaggggcaagagagctaggaaggaggagcgtcggcatcactggagtttggaatttatgagtctatgaggacatttaggggctgacatcttggaggcaattggaaatgtggtgtagagctccagtgcacgatctgggtgggaggtctcagatgcacaggtgccaggcggttgcagaagctgtggaattgggtggaactctccagaaacagcctatcatgagaagaggctgggaaggaccttgggagacacggacatggggggcagtgggaggggcaggggagccaggggaggggcccatgaggagcgaatgaagaggaggaggaagagaggggcatggtgtgacaatctggcctggctgacctggagtgtggacactcccagtccagaaagcggttctaggagggaaacacatgtcgtcccatcttgtcccatcttccatataagtcttcaagtcatttctgtggctcatgccagaagatccctcagaaaagcaggcggcgtgagaagatgctgttctcatctcacctgtgtgccttgggggggtggctggcatggtcttgagctcataaggttcagtggtcccgagcctctgcctcagcttggcgccttggcatggggagggcactcagggaagttgggaggtggccctctctttcctggctccgctgaagggcttggcgagctgttccatcccagtccacagactcctgcctcatgggaaggccccatattctggaggtcagttgacagctggttacattgtttgcatgaactgcggactgcatctgtttggatgaatgctgtaaagttaactcttcctccagtttgaagcattgctttgtgggtagaggaatgtgagggaggaggggacaggaatgaatgggtggaacttacccggagctgagtaaactcaccgttgtttacttaccaggctgggtttcagctgcagggcactcaatgccagcagaagcaccaggatcgcagggtgtgggcggcctggggtactgggctgaggagtcactggtcttcagaagagaagccgtcagtggttacgtatgtcctaatactgcctgccatttaataccacttttagctgaaaccaatcctaaattatagttaggagagcacatggactctcaagtagatggttgcagttcagagttcaggattactttcagggccagattcgcttaactaatacggagttcaaactaggagtcacaggccctagctctgctggagtcctggtcctttgagactctgtctgctgtttggtgagttatttctctctgggcttcagttaggggctctgttaaacaaaaggattgattggcctagtgactttcacattacttctcagagcccaggcttccttggaaggcccccagggctctcagctccagctcccatcagaacacctccactttcaccagcttcgcttagccagctgttacaacttaatttttttttttttttgagacggagtttcacgcatgtcacccaggctgcagtgcaatggcaagatcttgcctcacagaaacctccgcctctcgggttcaagcgattctcctgcctcagcctcccaagtagctggggttagaggcatgcgccaccacgcccagctacttttgtatttttagtagagacggggtttctccatgttggtcaggctattctcaatctcccaatctcaggtgatccacccacctcggcctcccaaagtgctgggattacacacgtgagccaccgcgcctggccagaacttccttttgaagtaggctttctgcagctctaaaaaggagtttgacaaacaacttggagtagataatcagttctgagactctgtagtggccaattcttgataaatttggtaattcatgtacaattcttttggggggcatatattttgatatttgcctttaaagattaacattcattgttctgattatgaaagtaataggtacatattgtagaaaatacatccaactctcaggtgtctcttatgaggatcccattcctaatccattttaatgaagtaagcttcatgacgttagtaataaatattttcaatagcagacctggggtaggagctgtgtagcccgtggcaacaaggatgggtgtgggtgtgtgtgcctgagacaggcgtgtctgtgtgtttctttatgaggcctccatcgtcctatctgcacaagagtgtgtgtcactgcctgccaggtcattcttccattctcgttctctcaaaacttacacatccatgtcacgtttcggcaagcttctgctttttgctagctgttaaggattaaagcaactcaaatgatttaggggtagtcatgattgatatccatccagtgacttttctgttttattgattaagtaaggcgatttatattaactaatagataggttcctcatccagcattgtcctagtctagtacttgtaactgtgaactttgtttgtttgtttgtttgtttgtttgttagtttttcttttttttttttcttttttcttttttttttttattgatcattcttgggtgtttctcgcagagggggatttggcagggtcacaggacaatagtggagggaaggtcagcagataaacaagtgaacagaggtctctggttttcctaggcagaggaccctgcggccttcctcagtgtttgtgtccctgggtacttgagattagggagtggtgatgactctcaacgagcatgctgccttcaagcatttgtttaacaaagcacatcttgcaccgcccttaatccatttaaccctgagtggacacagcacatgtttcagagagcacagggttgggggcaaggtcacagatcaacaggatcccaaggaagaagaatttttcttagtacagcacaaaatgaaaagtctcccatgtctacctctttctacacagacacggcaaccatccgatttctcaatcttttccccacctttcccccctttctattccacaaaactgccattgtcatcatggcccgttctcaatgagctgttgggcacacctcccagacggggtggtggccgggcagaggggctcctcacttcccagtaggggcggccgggcagaggcgcccctcacctcccggacggggcggctggccgggcggggggctgaccccccccacctccctcccggacggggcggctggccgggcggggggctgacccccacctccctcccagacgaggcggctggcctggcgggggctgaccccccacctccctcccggacggggcggctgccgggcggagacactcttctcctcccagacggggtggctgccgggcggagggactcctcacttctcagagggtgcggctgccgggcggaggggctcctcacttctcagacggggcggccgggcagagacgctcctcacatcccagacggggcggcagggcagaggcgctccccacatctcagacgatgggcggctgggcagagacgctccttacttcccagatgggatggcggccgggaagaggcgctcctcacttcctagatgggatggcggccagacagagatgctcctcacttcccagatggggtggcggccgggcagaggctgcaatctcggcactttgggaggccaaggcaggcggctgggaggtggaggttgtagcgagccgagatcacgccactgcactccagcctgggcaccattgagcactgagtgaacgacactccgtctgcaatcccagcaactcgggaagccgaggctggcggatcactcgtggttcggagctggagaccagcccggccaacacagcgaaactccgtctccaccaaaataatatgaaaaccagtcaggcgtggcggcgcgccactcggcaggctgaggcaggagaatcaggcagggaggttgcagtgagccgagatggcagcagtacagtccagcttcagctctgcatcagagggagaccgtggaaagagagggagaggacggagaggagggagaggagggagaggagggagacgggagagggagaggagggagagggagagggagagggagaggagggagaggagggagagggagagcgagagcctgtttgtttttttttcatttgagacagagtttcactcttgtctcccaggctggagtgcagtggtgcgatctcggctcactgcaacctccacctcctgggttcaagcgattatcctgcctcagcctcctgagtagttgggattacaggcatgcaccaccacgcccagctaatttttgtgtttttagtagagacagggtttcaccatgttggccaagctggtctccaactcctgacctcaggtgatccacccacctgggtctcccaaagtgctgggattacaggtgtgagccactgtgcccagcctgttttattcttattctttatttcctccagcatttttatatgaacatgttaagcataatgcaatgttgaaagaactttacaggtcaggcatgatggcttatacctgtaatcttagcactttgggaggctgacataggaggatcacttgaacccaggagttcgaggctccagtgagctgtgatcacgtcactgcactccagcctgggccacaaaactagatcctgtctcttaaaaaaaaaaaaaaaagaaagaaagaaaaagaattttatagtgaacacctgttttaccacctggattctggtgtggacattctaccatattcattgtatcccatgtctatccatctttctgtccttctatctgaccttcaattcatctcacttttttgaagcatctttgagtaagccatatatcaatacaccttctaaatattttagtatgcatattaactagagttccatatttgtttaattttttgtgtaaaatttacagaaaatgaaatgcacaaatcttaagtctgcattgtctgaggtttgaaaagtgcttagcccctatgtaacccgagccccatcaagatacagaatgttaccatcactcccagaagatcccctcatacaccttcggagtcactccctggccccacccaccctcagaggcaactactgctgtgaattttttcccagcatgctttagttttagctgttccagaacttgatttgaagggactcacataggaggtactcatttgtgtaaggcttctttaactcagcgtgctttggtgactcacccatgcttttgcttacatcagtagttcattccttttatgggtaagttgtatttcattgtatgggtattctgcaggtgttttttttttttaattctcattaatgggcatttagtctgtttccaatttttggccactataaataaagttactatgtcccatatcacagaatttatgtaccattctttgaggggggggcttatattttgatatttgcctttaaagattaatatttattgttctgattgtaaaagtaatagatgcatattgtagaaaaatacatcaaactctcaggtgtctcttataaggacactaatttttaaatcctgccaggcgtggtggctcatgcctgtaatcccagtactttgggaggctgaggcaggtggatcgcctgaggtcaggagtttgagaccagcctgaccaacatggtgagaccctgactctactaaaaatacaaaattagccaggcatggtggcgggtgcctgtaatcctagctactcgggaggctgaggcaggagaatcacttgaacccgggaggtggaggttgcagtgagccaagatcgtgctgttgcactacagcctgggcaacaagaatgaaaatccatctcaaaaaaaaaaaaatcctattgggtcagcgccttaccctcatgacctcactgaaccttaattaccttctgaagatccttctcagatatagtcaattgggggttagggcttcaacatatgaatttgggggacacacagttcagcccacagcaacgtggttctacctaaagacttgtacatcggcgctgagccaggcgtgccattgcctgctgggaattgagctgggtggctgtgtctggacttctgcatttcccactgtgggagtccttggcagcccaccagtgtgataagattatgatgacattgctgtaacaatactttcgtagcattttacaaagttctttcaagtacaaagtctaatttaacctcccagggaactggtgaaaataggtattgttgtgccaattctatggatgagtaaaatgaggcactagaagttaagtgtctggcccagagttccatagtcaaatcagtggtgaaagaaatccctctcctctaaccctgtagacagccgtgagatgtttccattaagggactcgcggatttctttcccacgtacaggctttcagcgttcaaggtttatctaggaggctttgggagttctgttgcctgtaaactgaggcagccaggcctggtgcatcacagatgcacgaaagatcacctcataagcaaaattaggtagacgtattcctcatgaaggagctgacctagtgcacagaaagaaaccttcctgtgtctaaccatgcattgatccataattttggaagtcctgaaattcagcttttctcatcctgttggtcagtacaacagggtctggattcccgatcctgaagaagtttggaagtctgctgaaatagccaaggactacagagttggtgacaaggtcctgcgactcctgctggaggatggaacggtgagggtccttgctgttcacagctacgtcgatgtgtaaagcggtagctggggtgtgtgtaaggatgggagcacgtggaccccgtgggaggcacccaggggagggcgcacgagtgggcaccagcaccattcccaaatggcctcctggtgccgggactcactgatgtgtctgtactccttccctcccgcccctgtgctgccctgcatccaccgggcctctctctgtaatgagggcccagctgcaggagccaggtctgtgccacggcactgcatttccaggcacccagcattactgggagaatgctgaaaagtgattcgccattttggcttcctgagtctcagcccagagattgggcagagatgaaaaacttggtgagaagtcgtttgagcccaaggcatacgctggtagagaaaaacatcaagatgtgaaggggaggaaaatgagaagagggagatagaaaacaggcagggagagggaggagtgggaggagactggagggagtcggtccacagatatatagaaatgtgtaagggagggagtgtggcagggacaagaagacatggacacccagctttgtgtgacattatgaggtgcctctgttggtgctggtgtggtgagggggaggtgaggatgaactttagcagttgctcctgtggtaggatgagctattgaggagcttccctgcaaggctgcatgtgccttctgatgacgcagcttctgaagactttgcatttgctctaagtgtccctcatgagttgtccttgcccaccattgctgtagtgacatcccactggattagtagcctagggtgactggacgggtttagaatcaagtatctgggtagagaactgggcaggggatttgtgctccatctagatcccagaggtgggtctggggaacatcatgtgaggattaattgacaaagcatgtaaatgggttctgcagacacaggacacactacttctaatcagactgtcctggatttgggagacatttcctgagatcctgggaaggcagatgaacacagcggttaaagacacaccctctagaatcagatggtctggcgtcagatcctggcatggccccttgttaagtctttggcccaggcccccagtttccccatatgtacaaaggaggtaatgactgtgcaccgtcccagggttgctgaagtgcgatgagacaatcctgtgtgcatgtttgaaggcaggagctctgggaagaggctcctgctccccggggcttccctttccaacaggagctcctcgcagtttttattgagtgtctcctgtgcacaaggttctgattagggatcagatggctttgtttgggaaggaaaatctcaaggcagcagctgcagtggcagtttgctgctttggtaatatctgcagggcttcaggtggctacattcccggccttgacccggctgcagaggtgagtaggatggcgggcagccagacctctctttagctcaaccctttgtcagtactgtaagagacaaggcctgtgtgctgtaggaaaatgtcacctctgcctccacctgtcaacataatgttcattacattttctcccctcccccaaagactgtctgtcctttctgtctccctgttgctttcacacataacacacacagaggccaaaccagaagtgggggttgtggatttacaacagaaaaacagagacaaggaaagtcagtatgtatgagaagcatttttcctgattttattttcaaaaatgtttaggttgagaatattctggtcggggttaggtcacaatacaattgcattggtaacaggggagcaggagctggcctgagcatccgtgtccagttgtggattgccctgagctgctcgctttatgcagaacagaccaaccagccagcaaaacccccgccatggacaaggaagcactgtgctagtgagagagcacaggcttcagagtgaggctcagattaactgtgtgaccttggacaacaaactccaactttctgaacctgtctcgttgactttcttggttggggtagtcatgtcctccctggaaggcagttttgaggattaaatgaaacaatccatgctgagtgcttggcatggggtctgcacagtggcacttgatgaaaggcagctgggccaccttgtggagctggtccaggaccagagatcagaaggaatccagagatactgactgaatacctggaaggcggcctaggaaggtggaagagaaacaagcatgctgggtaacctgctcaagtcgctttagttgggcttcacttcccccagcggtgaaatgggagtgtaggaattagaatactctgacattggaaaggcccagtcatctgtggcacagatgccacggggcatgctcgcctcaccttcgttctgctaaggcagctgctttaggaatactaggttaaatctagcagaagaggagcaagcctgggaaaattccttggcccagggctgagactgataggaatagacagccctgctgggggagctgtgagccctcgggcatgtgggcaactgcagacaggagacacctgcaccaggggcctttcacggagagaccaccacctgcatggactcctttaggtatctgtcaccaccaagtgtgtcaactttgagcagagactcaacaaccttagagttaaagagaccgtaggtcactgtgtcattttagctgcagcatcttgttttcaaatgaaaacttgcatggcctcaacatttaaaccacatataggtagagccctggtgggagattcaggaatggggcacctggatctctgcccttgtagcttccccaacactccttattgaggcctctgtagatctaaggacccctgctctagctcctcttcgcagatgagagaagtgaggcccagagagggtgagtgacttgccccagtgcacatagccagtgccctagtcccctgctcctacttttcattattccaggagtcagctgtgaagattttcttgttgctataagtacatttgctttttaatgtcagtgatgactctgatggaggggtggataggacaaaggacagtgcttcaacagaaacaccaaaaatcttttatttccagagctttaatttttatctttgtccataggagctggattattctgtcaatccagaatctctgcctccacttcggaatcctgacatcctcgtgggcgagaatgacctcacggctctcagctatcttcacgagcccgcggtgctccacaacctcagaatccgctttgcagaatccaaactcatttacacctacagtggtaaggagagcaattctaggaagtaaggaatggcactggaatgtaagcttgctgtctagagcctcctggttgttttatgtttatactgagcacccagagtttgttgtaaaaagaagtgtctgggtggggagaatcttcaacaagaactaagactggactacctagaaaaagagatgtaacaaagctcgtgtttgagtttctcatcagatttcatacatttattacttattttgggcaatgatattacttacactgcaaattgcaaaaacctctccatttgcgagcatttccacctgtcctgtcaaccaaccgtcagaacagcccgagggtgtaggtgactggcagggaattaattcagtgcgtgaagtgacttgcccaaagtcacacagaaggtttaataagcgacagagctggggtttcttaaaaaaaaaaaaactggagatgcaggtggcagtaagagtattttaactgcatctaacatctttccccaggaatcattttggtggccatgaatccttacaagcagttgccaatatacggagatgccatcatccacgcctacagcgggcagaacatgggcgatatggacccacacatatttgccgtggcagaagaggcatacaagcagatggccaggtagcttcctgccaagctggacttccccttgctctgccaatgctccctgcatttgccagaccatcacagtggaggggagatatctaggttgggctcattaaaagagataggccagaggtggtgctttgttgagccgactacctggaatgaatagcaaacgactgttccatgtacctgacctgtcaagactggagtttcctgggttttgttccttcaaggtagtcaagtcagtcctaccagtctgggaatagcagatgcttttcttgcagtgtgtttggttggaggagtgttgatttattctctgctatgagacgtttaagctttttttttttttacccattgcaggaagtaggatctgatgacagggtttttagctgcaggaggttttaggtgcaggagacatggaattttatcctaatttcactgctaggtgtttgtagggccctgtggagttctcgtttcactagtgcacatgtatgaaaagcctcctgtgaatgaggcaccgtgcacacattcccatgtgtcatctgggatggcctcagaatagcccacgatgcaaatgtctgggcagtaaacagcttcagggaataaccaacccagggtaggcagcaagtaaaaggcagatctgggatttgtgctcagatttttaaactctagtttatttttcccataactatcacttttggcttcagtgtcttcatctgtaaagtatggagaatagaaacaccaccctatctttgtagctgcctttacagtttgcaaaagaactttcacatacagtggtctcccttgagtcttacagcactcctgtgaagttgactgacttcattgccctcatttcacagatgggaaatctgaggcacaggacctggacctgctgactctttacctaaatctttactgcataaccccagccgcagctcctgagctccctccgctttatgtcttcgtctgtgagctggactctcagagggcacccattcctggttctgatgcttataatgagggagcaggtggtgcttacatgaggtagaacacgtgctgctttcctgcacagatgtctgatgggcagtctggggctagaccgagcttcttcagagtcatcagagacccggtgccgtgcagctccctgtccctggggtggggccgtcatcctcagggacaagccagttctcacctctgtcttccatattctaggtaacaaggcatatgaggggaagggtatggccctccaggttaaggagactctctggaagccccacaaagcacttctaacagctcgtcaggcagacctcactcacatagggaggctgggatgtgcagtctttcaaatgcacagaggggcactgcctggccactggggcctagtccctaagaaggaagaggagaatgcaaatgcatactgggtagagaattagcagcttccgctgcaccaagattccttctaaccctaaaacccctgtggttctgagatttttccctggctccctgtaggtctcccaggtatcgtggtgattagggactgggtatgggtgggatgagctctttggcactgtagggctgtgctcacttcagccctaaagagccagtttctccttggaggtctgtctgtgtaactgccataacagaacggagcccaaagcaggctcgtgttggccttgtttgatgctagacaggtagtgtccctcagggctgtagaacagggctgggattactaaagccctgttctatgccctgagggacactgagcatgtcatttcacttctcagagtcttcatcttctctctttgaaatgaaaatattggaccggggctctgtatccaaagtctcctctagcatttacatgggaggctgtggctctgtgctctgggtcaagtcactccacccctgagtcaccattttactcttctgtaaaagagatatctatgtcgtaggatttttgtgaagcttaaatgagaatctgtattcacccagcacctggcatgtgagcggtgccacatccacagagccatgttagaagcttccaccatcacagtcttatgacatgaaaagtttaatgcatttttaaaaaatctctaaattatataacagagcatgttggcttagagagcgcatatgttcccaagcatcttttgaataattgctctcaaaataatgtccttgaaatgtttttatatttaagtgggatgtgcagaaaggagttgacataaggcctgaggctgctatctttagaggcctgcttgcaaggtggcccatggctagcctctgatttcatgacggttcctgacatttcttggttgaaaaagtggctcattttacctaaactcaagctgtttgtgtaaataatgtgctttatgctgaatacgtgctttccttctgggagtctggaatattggcatatgctaggcagaaggtgggcactgcatctctaatgagcttccctggcagccagcatttcacatgtgctgtcaaattccttgctggaagaattgaatgtgtcctgtgtgacccgactgggagaggacccctggaagtttgcacccgtgttccactggaccttgccccgtgtgccttttccccgtgctgcttttgctgtgtatcctcttgctgcaatcagtcttagctgtgaggatgactatatgctgagtcctgagagtcctcttactgggtcattgaacctgaggttggtcttggggcccctcaacatggtactcaataaatacatgttgacaggcagcatgatgacctacacagggtccatctagaaagagggtgctcaggagagggtggggaaggcagaggagagatgaaatgagaggtgaaattcaagaacagagtttaaaagcaaaaatcctgcccagagagtgggaaggatgggaaggagcagttttttggttgagtggaaaggttgagtagggaagcagtaaggagtaaggatttgaataaggttggatgaaagatgtgaacttttaaaattgtgtgttctgcacgatcacatagaaaaaaaaatctagaaggaaattgattgagatttaaaaatagtagagtgacaaaacagtttccctcttttgtcttgtccacatttgtcttaattagcacatgttgcctctttaatgggaagaaactaatatttgaaaacttttatttgctttagaaacaacagaaaccagtccataattgtaagtggggagtcaggtgctggaaagacagtgtcggctcgctatgccatgaggtactttgccaccgtcagcaaatcgggcagcaacgctcacgtggaagacaaggtcctggcatccaatcccatcaccgaggtgcgtaccactgcggaaggcagctgggtgttggtgatggaaatgggggttggttggtttgtgtgctctcctggctaattcaagttcccaccctttaaagactaaagaagtgagggcaggaaagacccgggaagcctatttgctggtgggatttgaaggagatgggggcagaattgttactttcaaggctctcttctgctctacctgctgggctggaaatctaccatcagactccaggagtcctctgtttacatttacatcccaggggaaaccaaacatcactggtacactgaaatcactggtgttctccacccagctggcatcagcattcatgagctgattgttaaaatattcaggaattttgcaagctgattgataaacctttggtagtttgacatcagtcaggggagaagtatttataccttctgccttggcagaggccacatgtcaagactcttcctcctgccctccccaagagccagttcatcagcacactactgactgggacagagagtgggcaaggccaaccgtgacggtgcccaggggggtgaggagacagccctcaaggaagaagaggcacccaaaaggcacagaggagggtcctgcaagccaactccagctgccccgcaaaatgggaagaggattgatttgaatttatttggaagcaaagcaaaaaattaagaatattagactactagacctcttctccctgttttctcaaatcaaaatcctcaatgaatatttatcagacaatctactctgttgaagtcactgcttagctaatgtgggaagtgatggaaaagaataagacccaatctccaagtgtaagattcttctaacctaatgtaagaatattttaaaattaaatagaaacatatgtcggggggggggggtactaagaaacactgcaaagctcataattcagaggcataggcttacttagaaacataaattacaatccaagataccaatagaaaagttatcaaggctgggtgcggtggctcacatctataatcctgcactttgggaggctgaggtgggtggattgcttgagctcagaagttccagaccagcctgggcaacatgatgaaaccccatctctaccaaaaatacaaaaaattagccaggtatagtggcacatgtctgtagtcccagctactcaagaggctgaggtaggaagattgcttgagtcaggaggtggaggttgcagtgagccaagattgcaccactgcactccagcctggatgacagagcaggaccccatctcaaaataaaagttatcaagagccagtgccaagttaaatgcccagtggataattttgtgtaaatatttagggtttgtctcctctactagactgcacactccatgaaggcgggactgtatctatttggtttacctttgtttaccgagcgcatggcacatagtaggtgctcagtaaagacatgttggcaggcagcatgatgacctgggtcatctagaaacagggtgctcaggagagggtggggaggggcagaggagagatgaaattgaagaacagaagtaaaaagcaaaaatcctgcccagagagtgtgagggatgggaaggagcagttttttggttgagtggaaaggttgagtagggaagcagtaaggagtagggattggaataaaggttggatgaaagatgtgaacttctagttgagcatcataggtatttggggcctgaatgagttgaggcacctcatattctctcatttaatcctccctactctgtaagtgttctggtcagtctgggctgctattataataataaatataatgtactttagtataatatactttagtgtcattgaccaggtggcttataaacaacagaaatttatttctcgcaattctggaggctggaagtccaagatcagggggctagcaggggtcaggttctagagaggcttctcttctgggttgcagactgctgtcttctcacggtacccttacatggcagaaagagagcaagagaggtctctgggatccctattatgtaggcattaaaatcccactcccaggggctccaccctcgtgacatcattacttcccaaaggcccaccttatgataccaatacatagggttaggatttcagcatgaagattttgagaggacacaaacattcagtccataacagtgagttgcttatgattctcatattacagatagggaaattaagacctggaaagatgaattaacttttttgtttgtctgtttttgagacagggtctcgctaagttacccaggctggagtgcggtggtgcaatcatagctcactgcagcctccaactcctgggctccagcaatcctcccatctcagctttctgagtagctaggactacaggcacacgccaccatgcctgtctaattttttttttatgttttgtagagacgggggtctcactgtgttgcctcatctggtctcaaactcctggcctcaagtgaatttcttgcctcagcctcctgaagtgctgggattacaggcgtgagccgctgcacctagccagtgaattaacttttaagacattacacagatagcaaagatagaacccaggaccctgaaacatcagaacctgtgctctttctggtcctccccagtatctgccagtgggaccaaggagaaccttgagcagcaggctcatgttctgatttgtcatgttccctgccagcgtggggttgctttctttccccagacttccctctgccaatcagaccttcccctagggtacaggattgccttttactaaaaacccctccaataattttgaggcaaaaatcttttaatgttgttatttcaatagagtcttattttttttaggccgttggaaatgccaagaccacccgcaatgacaatagtagtcggtttgggaaatacacagaaatcagttttgatgaacaaaatcaaattataggagccaacatgagcacttacctcctggagaaatccagagttgtctttcaagtaagtattaaatttccttttccccaactttttgagcattatttacatttacatacttattatacatactcaggcaagctacactatgctgtgagttgaagagtagggttttcttgtctttcatttgcagtttggattcttttttctgtttattaaaaattgatggatgaataggtgtaatatcaggtgagttgtatgtctgcaggaaaaggttaatgactttttaatttgggggatttacaaaatccttatagtttaaaaagcaagtatctctttctagagtacgaaaactgtttgaaataggctaagctgacagactggctttcctatcaggaagggaatgggatcagagctattgagggggttttaaaagaaaggcttttctgccagtaaatggagaaatttctcatcattttggcccaggaggagagcaacagaaagccttgtattgcaggaagtttgtaaaaatttcactaggatgagttacgccattcccatttcataggacgttttcatttaataacactttctctgggttgctcattacttggaaggccatctcaggccacccagttctcagctgagaggaagggcctgcttgtgaactggccagatcacatcccagacagagaattatccatgcggattagatatctaggaccctctagttaaaaacctggcatttttgcttgtaaggatttggtgtaattttgaggacatttctttatcttacagtcggaaaatgaacgaaattaccacattttctatcagctttgtgcatctgcacagcagtcggaatttaaacatcttaaattgggtatgtgatggatcgtgtatgaaagggtctctcttttatggagggcttaaattctaggttaactttcttcttatagtaatatatttgttttaagtatttgcccaaagatacaagattctttggtttcagggacagaattggtgcatctaattaaggggatggattagggccggggggatgagtttagagagagggggcacttgtaagactgagggttatttttaaagctcattgggcctggcgtgatggctcacacctgtaatcccagcactttgggaggctgaggagggtggatcacctgaggtcaggagttagagaccagcctggccaacatggcaaaaccctgtctctactaaaaatacaaaaattaaccgggtgtggtggcacgcacctgtagtcccagctacttgggaggctgaggcagaagaattgcttgaacccgggagatggaggttgcagtgagccgagatcacgccactgcactccagcctgggcaacagagcaagactccgtctcaaaaaaaaaaaaaatagctcattgggtatttatggtcctccagctagaaccacctgaataagacctcctgacagctggaacatatgatgtcaccaaactttccattttatttgaacatgacatgttaacccacttattaaaacaaaccacctgtatcataatttgaccttccttgatggctcaaggtcattcattacttgtagtcataattaattatattccagagatggctaaaacatagggctgtttgtccttcagtacaaaaggccccgagccccgtgctgtcacagctctcctgccttagccatttgtgctatgctggtagatgagaattgttggagataacttctagtatgttggagttgaactcacactctctaattttggagaagttgcttgtactcttagaatctaagtttctccagatttcacatgaaggtaatatccttggccttgtctaccaaacagaatgtgaatagtgaacctgcagaagggctttctgaaagatcctctactatttaaacattagatgtatgtgtatatatatacacatacatgtgtatacatacattcatatatatacatatataaatgtgtgtatatatatatatacacatacatttatatatacatatataaatgtgtgtgtatatatacatatatatgtagagagagagagagtcattatccggattgtgctaatggttttataagagtatatgtatgtcaaaaattcatcaaatcgtacgtgttaaacatatgcagtttattgtacattcagtaaagctcagtaaagctatataaaaatgttaggtgcaggaacaaaaaccatgagctttagagttaggcctgcatttaaattcttgtgtgccatcagctattggaacttgagaaagtcacttcactttcctgagtctcagcttctgtgtctgttatgtaggattttttttgttgttgttttgtttttgtttttttgagacagggtcactgaggctggggtgcagtagcgccagcacggctcactgcagcctcgaactcctgggctcaagtgatcctcccacgtcagcctcctgaatagctgggaccataggcatgtgccaccatgtccagctaattttttatagagatttggttttgcccttttgcccaggctagtcttgaactcctgggttcaagcaagccccctgcctcaggctcccaaagtgctgggattacaggcatgagcctccacacctggctgtaatgcagagttctaaggaataaatggaataaactgtgtaaagtgcatgacacagttctttgagtatgaacttcccttcttctgataaatgtgtatgtccaaatttctgtgttacagacataacaaatcttactttttgatttcagggagtgccgaagaatttaattatacaagaatgggaggcaatactgtcattgagggtgtgaatgatcgagctgaaatggtagagactcaaaagaccttcacgcttctgggtaagggaaaatatcccatccaagtatgtagccattttctcttaaaaaaaaaaaaaaattaaggccaggcgtggtggctcacacctgtaatcccaacactttgggaggctgaggtgggcggatcacaaggtcaggagattgagaccattctggccaacatggtgaaacctgtctccactaaaaatacgaaaaattagccaggcgtggtggcgggtgcctgtagtcccagctactcaggaggctgaggcagaggaatcccttgaactcaggaggcagagggttgcatcgagccgagatcacaccactgcactccagcctggcaacagatcaagactctctcttaaaaaaaaaaaaaaaaaaaaaaaaattaaaaggtggggattcccagcaaatgtgtattctgaaggctcctaatcaattctaattttaggacaaaacatcagaacatatttggagactaagtggtcaagactatgcttttcccttaaaagagctagaaattaatttgtttttttcctcagccttcctggctcggctgtgagaggcatgggctgcaagccctgtgactgccgtaagctcttctaggctgagtacaagaatgactggtaaagccaaggtccaattcggttcagaagtggaacgttggccctctgtggccttcataggtctcctgatgatgacagtaaaatagtgagcactcatctggagcttgcaatgtgctgggcaccatcctaagcactttataactctgtgtgaactcattcaatccctacaaccaccctaggaagtcagtgctgctgtttctcccattttacaagagggaaactaaggcacagagatgggaagtgatttacccaacattaggcaactgattcagagtggaactggcttttgcactccagggtcttcaagcatctcatttggtacagaaaaccccatcttctattgctcagatgccggcacaggtggagcaggcacgactgtcacagcacagccagttgttcccaatccttctcgccttacttttcccacacagagctcatgttcagaaaggctgtctaccagatggtgtttataaaaacaggcattcactctctcattctgtatgagtctagacatccacatgaagctgccagtcaaagcttctgatcagggtgaggccatcggccatttctttctttttttttttcttttcttttttttgagacagaatcttacactgtcgccaggctggcctggagtgcagtggcgcaacctctgcctccccgattcaagcggttcccctgcctcagcttcccaagtagctgggattacaagcacacgccaccacacctggctaattttttgtattttagtagatacagggtttcaccgtgttggccaagatggtctcaatctcctgacctcgtgatctgcccgccttggcttcccaaaatgctgggattacaggcatgagccaccgcgcccggccagccatttctacgtcttgctgaaatctctcttgctgaaatgtcccgccgattcatactaagtgctttcattcttgtggcctggttgactgtatctgaatgtaaaaagctaagagtttcaggttaaacatgtccaaggaataggcaagacgatcacagctggataatggagaatgaaaacaagatggttttctaagcaaaatcaccatcagactgttccctcaaacctgcttcgaggagaaaggcagtttaaacattttataataataagataaacactttcggcactgacttacatttgctgaaaataattatggtcgtcatttcaatctttgtataatgtactccatggagagggggcttggtgcgtgaggaggggacaggtggccaagctctggctgggctgaaggatatgccctgccctgcccaccctcatctccctgatccttctactctctcccacctctattatgtcctcctcctcacagcaagataatgtagggcaaatagagtaggctttgggatcaaatgaatgtgaattcaaatcctaattggtatgaatctaaggttacccactctgagacttggtgtctttttttgagatggagtctcgctctgtcgcccaggctggggtacaatggtgcagtctcggctcactgcaacctctgcctccgggactcaagcaattctcctgcctcagcctcccgagcagctgggattacaggcacatgccaccgcccccagctaatttttgtatttttagtagagatggggtttcaccatgttgcccaggccaatcttgaactcctcacctcaggtgatccgcccgcctctgtctcccaaagtgctgggattacaggcataagccaccatgtccagccaagacttagtgtcttgatctgtgagtggcaacgcaccttatctttcatgacaactcgtgaggaagcatatgtaaaagtccccagcaccaggccaagcacatagcaggtgcatagtaactgctactccctgcctgctagctctctacattcccaattgtccaaagcctcaccatactttgagtaaaaccatctcttcttccatgaaaccttttctaattgttggagatcagcaatttgcagccatttgcccccatgtttcacacaacttaggttatgtttacagatttccacatcacgttcctcagtcccagggccaagactgggacgagacgagagaggcactcactctcagggccctgcatgtgccgggttggccctggacacttagcctgtgcacagacttagaagttttagacaaagccctctggagttttgtggagaggtagagtaccgtgtcctctcaaggcattaatggtgatggctgcctgctgtgctgtgtgaagtgggcaggtggtaagagattggggccactgcacctcttccctgcaactctcccttcaagagagggtacctcagctcaaacttttccttcaccttgcacgaggtcatcagggacttctctgtttagacatgctagggcgaagctagatggcctcatgaacgctgtgggtcttttctcatattgcggtgggcactggtgttaaactgcttagatataccttacccagtgtgacctcgggtgagttccctaaccttcctatgccttagtttcctcctctgtgagatgggaacaatactaggattccttcgggtggttgtagtgagcatgagaggagctgatgcgtggaaaataccaaggacagtgcctgaggcagtgttcccttcgccttcccctccatttctgctgctgagatccctcagttagcagtgagattacccctggagaagcgcgaggggaggcattttgattaaaaagtccctttcttctgctcttctgctgtgtctttctcatgtgattcatccactgacccctgccatttgagtgttgctatgatccttgccctctgatgggacgaacaccttggaatcaggctgtccctgggacctcaggctctaggaacttgaccagtgagctccccctggaaatctgattcaggctggcattgcttttgtgtgacaggctcactaagttaaggatgattacttaacgcaggtcttgagttctttcttttgtattattgttttggagttgttatctcccttttgtgtttctggaaggcctggagtagtttaaggggtttagttatggatcacagaaagcagggaggagtgccagaatggaggctcctgcacttggcgtttttagttgctgctcatgatcacttacctgtcattactgtggtggaggcctggggtatatttctgttggacacatctgtccttcggatggaggagttacctccaaatggaaaggcagcaagtgcctggactcagctggagctggagtcttccctgtgttcttggattgaaatcttttgagactgattttatttaatctttgtagtagaggagactctgggccaggtgcagtggctcattcctataatcgcagcactttgggaggccaaggagggtggaccacttgagcccaggcattcaagaccagcctgggcaacatggcaaaaccccatctctacaaaaaattagctgggcgtggtggcgcacatttatagtcccagctactcaggaggcggaggtgggaggattacttgagcctaggaggtcgaggctgcagtgagccatgatcacaccactgctctccagcctggacaacagagtgagaccttgtctcaaaaaaaaaaaacaaaaaactgtaggttttgaaattgttaaagaacatgacctacctgctaatggaaactccaggtatcctcaagtgaggggtcattggcttccattccagtgtccattccagggtggaccaggcagcctgcctggtgtgaatgagcctgcctgccagcccgagcgcatctctcagctgcttaagtcaccacagtgtcattaacacacactggggggatcccgacctggcaaaaccgggctcacagcgtgtgggtctacactgtgatttacagggtttgaacacagtcctttctagcggctggttttctttctttttggctccaggaaatgtgctaatcccctcacggtgactgaatatggtatgtagtcataatttatattctacttactgcaatcaaagtcccaatggggaacatggggcaggctcacaacagaatacaagagggaggggttatttattatttacaactgcagaggtgtgagtggagtctaggggagctattaatacaaggggcagtgggcacctggggggcagcagcagaactgttcactgctctttcccatgtgggcatccaagtgtttctggagcctagaaggagagttgggtaaagtcagccccagaggagcagtgaccttctgtcagtcaggccatgcagccagttggaggcagctttgcagggaagggggctggggaggacgcactcggaaccttctccgctcctctctctgctctcctgctagggctccccatgaatcaaacccaaccaaaggccagagggcatgaaaggccatcgccttggtttataccaagtcccctggggcagagagcagagaatctggaggggcaaacggaatccctccagcaatcccacctaaaaaataattcagggattcagagagcttgtgagcaaaaagaaaaatgaaaaacattcaaaatcaagcacagaatcaaggcaagatgactctccgaggaacctaatgtgaaatgattactgggatattaatttttgtgttgaacttcctagcagccatggcagaggggaaacctgtgtatagacacatgtggtatgtgtctacagaggtcgactagaaggaacagtgccccagatgcccctggggtccacttcacgttcctgtcccagagcttggcactgatgctacctgcatatcttgaatgaatccaggtgcccatcttactagtcagagaagagatgcagtattctaatctgggaaaatgtttgtttttaggtttcaaggaggattttcagatggacgtttttaaaatcctggcagccatcctacatctgggcaacgtgcagatcaccgcggtgggcaacgagaggtcctcagttagtgtgagatgctcatttgttttacttttcctttgtctaagggtcatagtggaactggctcgcagctgacctgcctttgctttttagcaccagatatagtcggcctcctgggtagactggtttaacaggaggcaggcggcaagggtttccagggcttgccttcaaagagtaaagcctcctccccttgcaacagtagaggaggggaaatggatctcctgtgtgcttttcttttattcaaaaagtatgtatgaagcacctactaagtgccacggactgtcatagcatctggggaaacagcagtgaacaaaacaaagcaagaagcccttcagggagcttatgatcaagggtagggaggagacacaacaagcaaatatgggctctggcagctgacggctggcacagaggaaagtaaagcagagggggcatgcagaggtgctgtgtctttcatgtggggtggtcagagaaagactttctgagaaggtggtgggtggcagcctgcaggggatgaagaagcaggttgtgcctgtggatgggggaagaacagcaagtgcagaaacccgcaggcaggagatgtcatttgaaaaacagcacgaaggtccatgtatccagagggtgagtgacagggagggtgtggatgaggccagagaggggagggggattgcagaccacataggaccttaagggcactgggtagttttcagcagaaggacacccactacctccttacacctgcttgaatcagacatcagtggtgctggcttcctgggaatgtattgtaagttttgtgaaagatttctttatttaatggacacaagttaatttgatgtgtgtttcttctatgacatatactatgagtagtgattcttgggggaggggtatgtgtttaattagtctcatcaatgtccatgtaaagaagaaaacaaacacaagtaaaaaatgtttctatgaaacacagaatctgcacacctgtaaagctttgcattaacaataacatgtctgtcctagtcaactcagactgccatatcaaaatgccacaggctgagtggcttaaacaatagacatttgtttcctcaccgttctagaggctggaagtctgagaacagagtgtcagcctggtcggttctggtgaggactttctgcctggctcctagatagccaccttctcattgtgtcctcatgttggagagagagcagacactgtgatgcctcttacgagaacactaatcccatcatggcaggcctcaccttctcaactttagccaaccctgattacctcccaaaggccccatctccaaatacggtcacattgggggttaggacttcaacatatgagttttggagggacacaaatgttcagtctgtaacaatgtctgttttcatgtccctcaaataactgatgggaatagttgatcattttgtgtaaccggtgagttcttggctgtctgctaccaacggtttggggagagagcagagctgagtggagcatgagctcctgggcttagcgttttaggccttttgccatgaccaggaagtaattctccttcctctcctccagctttcacctcagcgtccatcccatcctgcctgcagtgtccagacctcccagaatgagtcaattccccaagtgggaaagcagggagagaggtgacgagaggcctgggggagagtgtggtgtgtctgaagtggcagatccccctctgttgccttgctcagttacctcagagaagctgggcttctgcccttttttccccaaacccccatagattaaaaatgtgatttctacccaacaaatgccatcacactgagccctctcccgtgaagcttcttattaaggtagcattttggaggaggaattaaaattgattgactgaaaatcctttggaaagtcttctaagaatatttgtagaaaattcccagtcctataattattggtcctagatttgggatccatctccacccatttgtatcaggaacttgaaatgttggacacgttaaatttggacgaagccatctgactttttgaaaagctgccgcccctttgcatttttttcccatagcagcacctgcagctgaattgtttttgactcagaaggtttcattctttcttagaaggaaggaaaccaaatgccactgccagtcccttcccttataaggtcaggcacgtcaaagccagctctgtgttactgtgatattggtcagcagggggtgtgggtagagcgcagggaggggcaggactgtttccatggcttcctacactgtgtcctgaggctttttagtgcaatcatgtagatttcctggtgggctggaatggtgccggcaggggagcctgccttgggagttctcctgcctgagagaggagctgggagtcacatccttgcctgaggacaggagccctttgtccacactggctgaagggaaatgggagcacctcttcccttttttcatctgctgaccagcggggcagctctcatgccctggcttgggggagaagcaagatttcactttgtgtattcaggaaaagtcccaccccagccctcgtgtcagctgaggcactagctcagccatgggactcccaccagcttctgcctggcagcaacacctgggtacctcctggaccaaccatccaggcaaacccctggccacacaaggtggggcagggtgagtgcacactctgacaagtggcccaggatggttcaaagggaagagagagggctgcatccacatccacaggaacagggcagggtctagagagggtggcctctatggccttagtcaccgctgacattctttggttaaaatgaaaaatcagcgtgggacgcagccctggactccctggcattgctgcaggggtggtctgccaagggccaggtgcaggacccgtgctgctgtagcccccttgctctactcccaggtctatctccacctcctgaggctggccgtccttgtgccagctactactcagctcttgcacaggcctgagtgtgggcacgggggccttggccgggtgggattgtgtgtctttggatggctgggccacctgacggggcttgtgcttgtttttgaaggaggatgacagtcacctgaaggtgttctgtgagctcctgggcctggagagtggcagagttgctcagtggctgtgcaatcgcaaaatcgtcacaagctctgagacggtggtaaaacccatgaccaggcctcaggctgtcaacgccagggatgcactggccaaaaagatctatgctcacctgttcgacttcattgtggagagaattaaccaagcgttgcagttttcaggcaagcagcacacttttattggtgttttggacatttatgggtaagattctcttcagtgagcctgtctttcctcctttaaatgttgagagccccatggtttttagatcattttgttctggttcttttgtatttcacatgattagaaagataacattctctgcttttgcccctatagatgctaagtacactctcctgggctatggtgccatttattcaaagtgcattaaagagatgctgaattaggaatgaccaatgtcaagagcttactgtgtgccagctctgaggctgcttggcttccatgggctttctcacttaatttcttaaacaaccttataactatccccgttgtagagctgcaacaaccaaggcttagaaagactcaataacttcgtcacaattgctccgctggtgggagaacccagcacagttgtgaggctcctgcttttgcttttcccaccaaaggcccctgaggtgtggagccccaaggtcccttcccattcgaatcacaggggatgacaagtcacctaggcttgcaccttgcccaagcccagcggccagaggtgtactgaacccaggtctctgatcaaccacccccctaccccaatccttttccgttcttgggtgagaaggtcttggattttccccagccctcctccaggaggtcttacccttcatcccaccctggagttgggttctttttcattctctctgcctggtcctccttttctaaaccccgggctcagctcgtgctgaaacagctatggagtaaccagagtggaagctggcatggagggctctgtggagattgttatccttcaggcttttctagcagctggccccagtgcccagcccttgcccctctcctgggacccaccctcgtttcttaacaggagaaggggaagattgacccatgaaaggcatcctggagtgttccacctggattgggggatcttccccacaccatggcaaaaagcagctcaaccccattccccatgcaaaggggagagctgagctctggccttcacggccctgctgctgcctcctggggaggagggggacagggccacaccacgctgttggacttgcacccaggtggagaggcagcttttcccatagctgtcaaatgggagacagtcaagggagctgctttgtttaatttagatcctaagttaatacatatggctcccaattaatagtacgtgtcaacagttataaaatgcttaatacattactgggatagcctagtcaattatttaccttgtcttcttcccagaaagtgtttgagcagccagttaaaagcttaagtgaacttttaaaaatggatagtcctcattaaaaatagtcctgtttcattgtggtggaaatacgtaattattctgttattccctgttcttttgggtgtttttaagatgtatttttaaatgacagtcctttattttaacagtatattatttctttcttttttttctttttttttttttttgagacggagtcttgctctgttgcccaggctggagtgcagtggcaccatctcggctcactgcaacctctgcctcccaggttcaagcgattctcctgtctcagcctcctgggtagctgggactacaggcacctgccactacgcccggctgattttttttatttttagtagagactgggtttcaccgtattagccaggatggtctcgatctcctgaccttgtgatctgtccatctcggcctcccaaagtgctgggattacaggcgtgagccactgcacccagccattatttcatatttttatctaacagatgtttatgtcccaggcactgtgttggaggcagtggttgaacagcatagatgtacggctcctgccaccgtgggactgagactggtgagggcagcaggccggcagtagtggttaggatgagtcctgggaagggaggaaggtgtgctggaggttagcagagggtggggacagagcaagggcagccatgtgcaaggagtagtgagctggacggtggcccccaggcaggatccagaaccactgtaataaggaatttgaatttttcagctatgtggaaaaacctgagacaagagtatttataaatacacaaagacttgttagagtaaattattttaagattcctctcaaaaattctaacaatagcctgtttgctgccacccttgagttcatgatacgcctccaaaaaaatcagctttcttctaggcagcagggctgcagcctggggccaagcctttcccgccccctccagcagcctcgcttctaggctaaccctcgcctaggcatacctgcaacttttgagaaagctctttttgacttggaaataaggaagcctcaaaggaagacttagcatctttgaaagccagtaaagctgaagctgtgagcttcaaggtctaagctgagagtgaatgaaggctggtgactccccagcctgtcgtgtatttatgttctttggacccagagttggaaaaacctgggtctgggggtcagacccctgggaatgagctccgtagcataccagttacgtgacctcaagaaagtcacagaacctctccaagccttagtttctgcatctacaagatggggcctctcttgcagggtgattttgaacatatgatggaagaaattatgcaggtaccttgaaaaccataagcatggttccagtgtgaagtgttttcatagccaatgtgcctctagcattttaagtcacagatctaggtctttccatgggtcctaaacttcagatttttgtgccccaaaataatgcattgatgtttgacattttgccaggttctagaaagccctgcccttggccccagctgtgagctgcagagctcagtgagacccttttgaatcttcccccaggcccagccctggccttgcttccatgagcagaccagcctccgaatctctgagccaccaaggctgcgtgtggaatggggctgtcagagctgctatgaatcaccctggagctgtctagaggacagtccaggttcttaccctgcccaggaattccagattgagccaaaccagctcagtcaagtgagactcccaggggacctgtgataggagccggcaggaacctctcaggattagagcgattaagaacaaagctttggaggcaccaagcactggggtcgaattgcatttctggcaccacttgctggctgttggtcctcaccatggtcactccttctctgaccctcgtgtgtgacagtggagtcacaggagcccttcacatagggctgtgttagggttataggaggtgacgtgcataaatgctgacaccttaaaagtgctcagcaagctgccttccagcaggagctcatctggccaggtggtaaatttggtgcctctgttttgttcggcccacgttttgcagagtgggattattcacttaaaagtcccagttttctgacttttcttaagaatcaattaatctaacatcctgggccgcattcatccatggctacatccggcaggagctgagtagcagctgcctccccaagggctcctctcagttcttgagcttgcaactccaaggcaactgcagaggcagctgatgaaagtctgaatatggaagccagccatgtctgtctcgtccctgatggggtgtgctgggctgtaggatatgaaatgactttgcccttttcctctaggaactatgaaagcaccccttagggaggcaaaattgtgctgcagttgtgctgctcctcccctcaacagacaaggagagaataggaaaccacattgccttctcattggaggcacaggcatcacagtcaggcagcttcgcagctaagttctgacacaagctgtgtgacctttggcaagtttcttaacctctcgggcttattttctgacctataaagtcagaataataattgccaatatcactgttgttgtgcggactacaccatatggtgacatgcttattttaatgcctggcttgaggtaggtgttttatacctaccagatttcttccgggggacaaccaggaaaagggttatttataaactgactactaggatatcattaaaaccagaagctttgaggggtatttaaaacttgtagaagacatagcaaacgtttaagcttttaagtgtcaaaaaatatctataaacaaatgcatatgtcttgcttcaggttatattttaacttgtttaaattgtatttcagttttgaaacctttgatgtgaacagctttgaacaattttgcatcaattacgctaatgaaaaactgcaacaacagtttaacatggtaggtgacctttctgccttcttgactagttctcagccgcgcgcgcgcgcgcgcgcgcgtgtgtgtgtgtgtgtgtgtgtgtgtgttcgtggaaagaggcattcttctttcttgaggttgcaaatttttatgcaaggagcctcacgctgggtcactgcaccaccttgtggccaaatcttgaaatcacaccctctcatctatttcatcttttttgaatcacctgccaatgtgtgagcctcactgcccttcttggatacagaccctctgtgcagccagacaaaactatttagttggttgcctgaggcctccactttctttcgagcctctctgtctttgcacttgctgctttctctgccttaacccacgtgctcctgttatttccccattgctttatcttcacgtggccaactccagcttgtgttttgagatccagcttccctgagagcctcctgcgatacctcctggcctcttcctatgtgcttccttatcgcaggcctgtcacatggaattatcatcatttgcatgcaagtttccaaatagacttggtcacctggagaggccaggactggcattctttgtctctctcagcccagtgcttatctcggcacatgcagcactaaacagcagatggccaatggattatgggaatgagtttctccaaccttaatttagaacaagacatatatggtaccttcctaactaacaataagatcaaatgtatcatcccatggaaacagacaggagatggattccaattttttttttccactgggaagatttgtttattcaaaagacgtttttgagtgtatactgtgtataccaggtaccaagttaagtgctgaggtagaaagatgaataaaacaatttaaaaaatgttgactaaatgctacttgtggctgtttgggcatttattattgctatgtgtattgaatacaatttcaacctcttaaatcagttccctagatgcaagaactttattgaattcacttttgaattcccaacagtactgacgcctttctgctcctaacagaagtcaatgaaattaaaagttgattgaacatctttctacattggccctaccatgaaactactctcatattttttttataattgcctccttaacatttatatttggctctgtttctgaaaagccatgaaagctaaaatgctttactaactcacattttccctttagcttacattctaaactttggctacatgtttatgggaagaatggtgattccagttcataatagaaatcacactttaataccctaacagttactccaaggaaaggttatacctttgttagtgtccagtcttatgctccctcagaacccctgaggaaaacatagcatgacgtcttggagagtgtgggctttggctcaaactaaattgggtttgaatctcagctctaccacctccctctgggaccttgggctctctgagcctctgtttccttgttttaaaaatgagtcatcattacacattgtatgtatgtgtcagaatatcacatgtaccacaaaactatgtacaactattatgtatcaatttaaaaagagtcaataataactgtctaatattgtgagaagacctaacattgaatcctactcagtagaagtttcttttttttttttttggcccagaattaattcatgtataaccattaaatttcattccattgtaaatttcatttctttagcatttgcaaggctctcctggaagtttaacattaataactacagctgaggtttattccaagtgcatattcagtataactcacctgaagtcaaactctctgtggctgctaccctgttccctggctgcaatggcgtgctgctccccaacatgtccaccttaacctcaaagtgacacttataccagatgtcttgccaaaaatcacaaatcagaggctgtaattctatttttttttttttgcttttgttctcctctcctgttcttcttcctcttccacttcctcctccttctcttcctttttcctcttctcctttttctgagtcatccatcaatgtgtagatcctcccaggaggggtagtatcttcaattgtcagcacagaaagctttgggtaggactctcctgatctccagtccccctcttctggctgccactgggccttgcacctgatgcccccagggagctcagcagtagcaagtgtagaagtgccggtgccaccttctcctctcagcccgcttaccctccacgtgactttctgtggtcaagtcacgccatggaccccatgtcctgagcctgacattcatcctgacctcttcgctcctcttcctcctccctgagtcccagccatcaggagcatcgggctgagtcctcattggtctcactgcctccggttcttccctcctctgagccatcctccaggtctcatcataacccctccgccctccagcgggtcctcactgctcctagaaaaaggccataggcccagaattctctaaggagggtgtgaaggtctcaggtgatttgactgtaccattctttgccaccacattgctgctgtcctcctgtaatttctaacctgcttgaggtgcgtttctcaagcacccattgagctttcatgtggttcccactgggattcctccataggagggttttcttgatgccccaccccaccccaccctaccccacctcaccacctgccagccaaactttctttcatcctccatggtaagcctgagtacatcctctgggaagcctccctgatacccttacagcccaagtgagtagtgcacaaagatctctaagcagtgggcttctcccaccggccccgcagctagcattctcaggtagctggctccacccagccaggctgcattaggccaaagaggctggatctgtccttggatagctgctagcaggaaggggctgtaggaccacactgagtaccatgtggtgctggtggtgacacaggctggcccaagccatgtcctaggaggtagagacccactcagactaggtgggaggatgacagctagactcgctttaggaactcggcggtattgatcacggtatgggccttgtctatacttcagggtccttctttttaaacataaatattacagatcaaccatttacattttccaaatgcttacatcctgctctttggaaacgtattttaatattctgttttactttctgtattaactttggattcccagcatgtcttcaaactggaacaagaagaatacatgaaggaagatataccttggacgctgatagatttttatgacaatcaaccagttattgacctgattgaagcaaaaatgggaattctggagttactggatgaagaatgtttggtaacttttaagaataattgtttttttcagcttttaagtagtaacagatgagcattttgcaaagcagtttttttgaagtgtgcttgtgaagtcctgatgtttatccagttggttggatggatattaatgctgggacagcatccacagcagggaccccagagggcccactgggccttttgccctcagcctgtgtagaccacgcttggggagctgcaccacctcttttacctgacttccagcatggaggctgtcccaaagtgtatgtagaaacatgcatgaaaacagcaagtgactccactcaagttgtcggtgactaataagaattgagttttcttttacatcctgattcttgtgagtcatcaagaaaaatcaacatcgtatgattcaccagaagagctttctagagttttcttcttaccatttccctctgggaaactctgaagtaggccagcctggcagtgtctctcatggggccacaagaacaaataatcccaaagtgaggattaataaggtttcggggttaaaggattttttttttttttgagacggagtcttgctctatcacccaggctggagtgcagtggtgccatctcggctcactgcaacctccgcttcctgagttcaagtgattctcctgttccagcctccggagtagctggaattataggcgcacaccaccatgcccagctaattttttgtatttttggtagagacggggtttcaccatgttagccaggatggtctggatctcctgacctcgtgatccgcctgcctcggcctcccaaagtgctgggattacaggcatgagccactgcgcccggccaatttttgtatttttagtagagatggggtttccatctcaaaaaaaaaaaaatcacatgtatcaagatcaaatttcgcaactagcttagtacaaggaggtatgcccttatttcaaggagtgagttaattaggaagtaaaataagaaaaactattttcctgaggcaggggaaggggaggactctctattcaggtgccagtcttttcccattcacccgtgaataaaggtcatgttcgtgtaatggaacccacactattttttcctgaacgtttagatttctttgggaagaaataaaatactgcctattttatagaaataaaattcttcattctaaagtcattgtgtgaccatttctttttaaagttttgttcttctaaagagactttgatgtatccattaaaatatcacatcaaataccccacaaatatatataattgttatttgtcaattaataataatttttaaagtgccctaaagattaagatcaaggataaattaatgcctaaagttgcttttttaaaagcctctaaggccaggcgcagtggctcttgcctgtaaccccagcactttggggaggccaaggtgggtggatcacctgaggttaggagttggaggccagcctggccaacatggtgaaaccccgtctctactaaaaatacaaaaattagtcaggcatggtagcaggcacttgtaatcccagctacttaggagactgaggcaggagaatcgcttgaacccaggaggcagaggttgcagtgagccaagatcgcgtcatcacactccagcctgggtggaagagccagactccatctcaaaaataaataaataaataaataaataaataaataaaaagcctctaattgagagcagttcactaagtgccaaatcaccttggtttcttagaattagtgcttttcctcacctgtatgaatctctggttttcttacttgctatttggtttatttttcttttccagttaccacatggaactgatgaaaactggcttcaaaagctgtataataattttgtcaacaggaaccctttgtttgaaaagcctagaatgtcaaacacatcctttgtcatccagcactttgctgataaggtaccgtgaaggtctccatcaatgctgtcaaccccggaacctgtacagcctccagaaggagtaggcaggccaggaatgtttctgatcagattcaagtcatacttaacatgtagctttgatgagtgtgtgtttaacagttccttatttgtttttgtggcgagatacatgagttccaactgtactactttaaagacgaatgtgttgttagaagaccacacttctgattttggatgtactgaagttactgaatttcattaacctcttatcagtttattttctatatgaaattgtgataatcaagacagcataattcttccttatgatgaaagctatatttttttctgaagttctatttgattaaactggactatattacaatggcaacataggttaactcaagatgatgatgggttatcttcgtgctttttttcatcttttgtgtcttctttttctttatacgtctcctttttctttttactaaacaaatgttacttgtctaaaatgaaaaatttttgttaaaatcacattatagaaagcttagaaaacagaaggaaaaaattgccataaccacctgccctaaatgtacattcttatttgttttccttccttaagggagctcctacctcctcccatgtcctggttgggtgttgccttggtggcctagcccagtgccagggctcacaggaatggcttgtgcttgtctatgtttatcgcagaggccggtgctgtgagtcagagctggtcattcccgagtgactgatggtggagggaggggacagcaacctggaaagctgtgatcacctttgtgtgctagcagagtactgtaaaatattaaaatataggattggccgggtgcagtggctcacacctgtaatcccagcactttgggaggctgaggcgggtggatcgcttgagaccaggagtttgagaccagcctggccaacatggcgaaaccccatctttactaaaaaatacaaaaataagccaggcgtggtggcacgcacctgtaatcccagctactcaggtggctgaggcaggaaaattgctggaacctgggaggcggaggttgcattgagccaagatcacgccactgcactccagcctggccgacagagtgagaccctgtctcaaaaaaaaaaaaaaaaagaaaaagaaaaaaaaaagataagtttttagtgcttagactttttcagatgggctcctgaaaagatgcctatgaaatgaaatgatcatatgtcaaattatatttcctagctattgtcataatttcagggttctggtcccataggaaaagggagggggaaagaccagactccataaaaagcacatatgggatttctttcaagggtctctctttataggatgtagtttctggacatgtaattctctcacctgccacttccaagaagtctcccttaaaagaactaggcagcgtttgggctggactatggattgattggtgggaagaacccacatgcactatggggttagattaggttttcaatctcattggccagggaaatcaggtcgtattgaatgcaagtcagctgagcttagatgtagcagctcagcacatcttcccttggtcccagagtccccaacagaggcaccagctgcatgtgacactgtccccacagatgctcgcccagaccaggaaagctctgtatttgccacctttgtctatctgtcctagtggctcacaccaccattctggaagaatttgtacaacaatccaggtacttcattcacaaagaagtgtttgcaaacagccggtgttcctggatcttaacctacctaccggcaaggatacttccttacctgggggacaaagcagaggccatgcccagggaaccctctgcttacggattccagcactctcccctgtttcctcattgtcaatttttaaaattaattttaatatacgtttttaatttatgaaaaataaattatcacatattaagatatgcaatccagaggcataaactagggggaggttgaatgttgaagcagccaccctggatatgccatggtttgaggcattcaagaagccttcttcatcagaaagggcagcatggagagtttttctaagctagattcaagcagtgcaaaggttgacccactctaaacctgattctgagggcttggtggctcttgaaggcttggtggtcagctggtcggtttttctatcctttctaccacattaatgttgatttaggaaacgatgtctgtttgaacccaatgaacaccactaagctttttcctcctcctggtggcttcaaaggcaaagggagacctaagtcaggtgttcttgtaggaactgcacataccgcagggagcaactggacccctgtggccagagggagccaacaggtgagtgcagagtgatcagcaggcaggtgagaaacccaggtggtgggagagaagacacattcccagcttatacataatggggctgctgccatgatgcacagaagccagacgtctttttgtaagattgcctctgtagccttttttattaatctttcttaaaaaagagatgaaacttgtgcttagaggctatattctttggcctctttgggaataattaattgctttctctgtataggtagagtataaatgtgaaggtttcctggagaaaaacagagacaccgtctatgacatgctggttgaaatcctgagagcaagcaaggtctgtaaagtcctaggggtaactaaagttattatataattgacatggatctagatgtatataaggaaagagtaaggagagagagagagagagtgtgtgtgtgtgtgtgtgtgaactctctggacagtggtaagttgtagctcacagattcaaaaagataactactgtaaatctctactatatgcaaaatcagaaatcaaacatgcagatgacaggaaggacagctaatagaaccattgaagaatcacaattccagccagacgtggtggctcacgcctgtaatccccgcattttgggaggcagaggcgggtggattgcttgaggccagaagtttgagaccagcctggccaaaaaagcaagaccctgtctcttctaaaaatataaaaaaacattagcagggaatggtgacatgcctgtagtcccagctacttgggaggctgaggtggggaagactgcttggccctgggagatagaggctgcagtgagccatgattgcgccactgcactcttcttctgggcagcagagcaagaccctgtctcaaaacaaaacaaaacaaaacaaaatatgaaattcactctgagagaagataagacatttaaagaaataactgatacaaagcagaaggtagtaagtgctttaaatgaggtacaaatacaagatgaagacggttcagagaagttgggattaattcattcattgcgaagtgggtggggctggaaaacattttaagagattcctgggtagggtttggatctgcagggatgagaatgtggagtaggagggaggagattgcaggtggagacacagtgtgagccaggcacggaggtgagaatagtagatgtttccactttctgacacttagagtgatacccacatacagacatttacacacttttcttctctgttccccttctcgggaaagaagtcacgggccatccctatgaaagacgatcgtcttgtggaattgagatttggctgtagatgttggtgaggttgttcaccgcccactagtttagctgagttgttgtcaccatttacgtggcttgtatgagtgagtactgtgggcagttgcttttggacattgagatcctctctgttccttccagtttcatctctgtgccaacttttttcaagaaaatccaactcctccttctccttttggttcaatgattacagttaaatctgcaaagcaagtcatcaagccaaacagcaagcatttccggaccacagttgggagcaaggtactgagaaggtgtttgagagtgaggggtctaaaggcagggccaggccctggggagccagggcactcagaggacccgcattccaggcctggacatggacagacgctggggctcttccaatctaacatggactccactgcaaaaagttcatcgtcgtcatacttccacctccaaggcagcacgcactggagcaaaccacgctcttgcacaataacatggtttattcagttctctgctgtctgggagtattagtgttctgtccacaacagtaggacatgctgataaaccacagtcacggactgaaacctttcataataggtgtttatgcatgaggttaacttttcttcctattgagtaacttaacaaggttgggctgctttttaccgtgatgtaagcagtaaattatttcagagccatgtttgatctctagctttgtttcctagttccgcagctctctgtacttgctcatggagaccctcaatgcgacgacgccccactacgttcgatgcatcaagccaaatgatgagaagttaccctttgagtaagtgttcttatgcaacacacagcgaagacgtgggaaggcagtttctgccataaagttggagaatttgcttccaattgtcttgagattaccctgtttctgggtttttttttaatgattcagaacaatgctgccctttacataaaatgttagctcagcccctctggttaaaccccctcatctccagggctaagcaaaagggctagatttgaaagaatcttctacaactaaagtttttgcaacttgaaccttttacttgattaaaagaagaatgagtatgtgtgtttgtagaaggtcatagaaggtcagaacatttgtcctcagacatgatggcatgaggcattattcttgttctctgggacccatggaggagacccaaagcttgtgaatataaggtgtaacaagtcccttgtagcttgctagagctgaaagaggtgcctaaagggggatgagctgtctatggaggtggtgagtgtgtgtatgggtcaccagatgggtgagacctaagctgcagagctacctgttgggtgttctgtagaggaaattcaagcatcagtgggtgcttgggccaggcgagctagcatatttctttccacctggttgtcgtttgaagctcacctcaaaggccagttcccccatggccttctcaatgccacctccatcagagtcagctgctcctttctctatatcccactgcatctttatggactgttttgcagaggtgctatttttcttggtcatgcaatagaaacttattaagtatctgctgggtacctggcatagggtcacagtctagccaggtctgctgtgcctgtttatgggcatgttgagcaattacgatgcctcaacacataatatcattgtctttttaaagatttgactccaaaagaattgttcagcagctgcgagcctgcggcgttttagaaacgattcgcattagtgcacagagctacccttccaggtatgttgtccgtccttgtcttggagggaaaagtacctgacatcagagctatgctgagaaccaaggacatggctgccatgatttttgtcacatacttttggcttctgtaaagtgcccccaagattttcccactgccctgtggaagtccagaagaggttgagaaataggctttgtaggggtcggaggtcaacaccaccttctcaccccatcactgcatctcggctgctggtggtggccccaccgcctcccccgtgtactagggaagacgctgagtgggagaaagagcacaattgctggggcagacaggagtgctcagggtggtcttggtagtgtcccaggcaggcagggtatcaaagatcagtgcctttatcctcaggacagattgcaccacccccgccctatgacaacagtggcaggtaaggcagcggagtccccagacacaatgtgcttcctctgacactcctggctttgatcccctttgattttccaggtggacatacatcgagttctacagtcgctacggcattctcatgaccaagcaagagctttccttcagcgataaaaaggaggtgtgcaaggtggttttacacagactcatccaggtcagtttccccacctcctgggatcatggtctccttcctggaagcacatctcccaaacatgctgtttcatctttgtcttgaatgctcaggactgtaatcatgaacacctgaaaggaaagaaaatgtgccctgagcatttgtctgctgaagagaccatagcagagtgctcagtgggccatgagtccccgttagggacccacatccgaactccggcctccccagtgtcctcgtatcctgtttagctctcccacgatctaacccagtcctctgtggaccaggcttataggatatggtcaactggggttgtcaccaagccacatgggctccaggcatggtgccttgtgtggattgacatcattgctgcagcgatgagttgtgatgggaaagagatggggagttataaggtccagcaaaggggatggtgaagagaacccaaaatggagacagaaaaccaaacttccccagtttcttctactccaatgtggagaccacgagagagtggctgaggttctctggcagcccaactgagaatcgccgcaaatgacactcactccccttctcacccacaaatggattcctcagcctaagtcccatttcttcctccagggtaattttaaacaaacaactcaaagtatacatttctagatcatgatgtgagttttctgccttaaatgtcaaaatcacaatatttctggcacctttgaatccctaaagctcttttccaaatactgtattatagaaaatctgacagattttaattctaactatatcatttttctcttccaggattctaatcagtaccagtttggtaaaaccaaaattttcttcagagcaggacaagtggcttatttagagaaacttcgattggataaactgaggcagagttgtgttatggtacaaaagcacatgcgtggctggctccagaggaaaaaattcctccgagagagacgagccgccctgataatccagcagtacttccggggtcagcaaactgtgaggtatgttggaatcaaggaacacatgtggaactgtggggctttctgtgctgatcatctccggcggggaggactcatcaaggacaagggacctttctcctgtgacccagggtgcagacgtgcatgggtcccctttgtggtcgtgagcattagggcaagaaaggtccgtctctcaggggcaggtagtgctggctctgcctggtgtctgtgtggtgagccgacacccagggccctgcagggaggaagtgctggtgagagtgttactaaggagagtcagggttccggaagctcagggagaggcccggggcccctttcctatgggaactgaaaatgcataagatcagcaaggccctagtgaagatccaaaggacagatgtcaagaatagccagcgaccagcctgccagcaacaggtggggtgcaccatggcagagggggtccctgcaaggcctggcagcaaaccaatcacagaacccctaagcaggaagaccacagcagccccagccaagccaagggctgaggggagggtggtccaccagctgcgctgatcctacctgcctcgaggggtcctgagagtccacacaaccctgccagcccactgaaggaccacggtcattccgggacttccagggctttggtgtacctgctggaaagcacaagaccagggtgcccctagataaactttgtgtttctctctgcctgctctgccccttctttgggatgctgtgaggatgcttgagaaggccggcgtttagggtcaggctgcgtctgcaagcctgacttcttcctgagctggaggctgaactgtggcagcatctggccttctctgcatgaccagcgtggtgtggcatggatcacacagctgggctggcttgccctcctgtgcttctgtgcccagttgataacagcagtctttggggaaggaaatcacagttatcttacccgccaaggccacgctcccttcccatttggggctcaccagagcctgatcatcctgccctgctggcctcctgcctatcccattcatttcatcccactcctgcccccagtttaggctcacggcatcacctgccttgcactctgatggcaccgtgctccacctcccacctccttcccatcttcctacatcagagcctgattgagccactgccctgcacctgcctttaaggcccgtgtttcctacagaatagcattcagtctctgacgtgatattcaaagccctccatagcctgggtgcattcataagaatggaagctccatgagggcaggggccacacttgtctggtcattcatacccagacctagcatggtggctgtcatagaaggtgttcaacaaatatgtttttaaaataacaaatggtgcacatctatttttctaacctcattgacgtctaattttcttcatccatcttattctagtgattccaaacaaactccttttctgagtatttcaggcactgtagagcctccatgcctttactcatgctggtcccttatcctgaaagccttttccagccttcactgtgtacagacatcctactgcattgggggctggctcacatacccactttccccaagcagaataactgtttttttcccctctcacttacagatctagttaggtggtattttatttttcctctttcttggccatttgttagtctttctgtacatgaggttgtaaactctaaaggtaaggacattatcttcacctctagtcatttagacaggggcagcaaactttttctgtaaaggacgagatgataactatttaaggcattgggggcttgcagtctctcctgctgctgtgtcatgaaagcagccgtgggggatatgtaaatagtacgtgattgagcaagtgcagcaccagtgcacagtctcatcatcgtctctgtgggtacctgagtggaggtgaatcgactggcctgaatgaaaagagtgaaagttcccatgtggttcctcaaggacagggaactggggactggcctcaagtaggcattagaataaactgcccacagagtttaatgtggagaggtgtaaaatatttgaaccttccttataaacacatgctagccaagcttgcagctctgttatggaagttgatgctctgtgggtaacagactcactcttcatccttgttaaccaaggaaagctattactgcagtggccttaaaagaagcttgggcagccataatcattcagaagcactgccgcgggtatcttgttcgcagcctgtatcagttgattcgcatggccaccatcacaatgcaggcctacagccgaggattcctggcaaggaggaggtatcgaaaggtgaggccaacctctgtctagaggaagggagggtgtacgggccttccttactgagaacaaaacagggcccagggaaagacttcactatgggcaacctcactttgtacaaagtgtcagccaagccagaaaggagattcttccaggtgctgtggctcatgcctgtagtcccaactactcagggagctgaaatgggagggttccttgagcccaggagttcgaggctgcagtgagctatgatcatgccagtacactccagcctgcgtgggtgacagagggagaccctgtctctctctctcacacacacacacacacacacaccagttgcactgttggtttctctttctcccagttggccccaaagagaccacaccaaaggaaagtacattttaagccaataatgtgcacctaacagacaggatatacacctaacagacctcacctaaagcagagactgggttggggaaagaaattttaaaagatcagcacactggctgggcacggtggctcacacctgtaatcccagcactgtgggaggccgaggtgagtggatcatgaggtcaggagatcgagaccatcctggctaacacagtgaaaccctgtctctactaaaaatacaaaaaattagccgggtgtggtgacgggcacctgtagtcccagctgctcgggaggctgaggcaggagaatggcatgaacccgggaggcggagcttgcagtgagccaagattgcaccactgcactccagcctgggtgacagagtgagactccgtctcaaaaaaaaaaaaaaaaaaaaaaaaaaagattagcccactgccaccccacagactgtagagagctctcacagccagatgggatgtccagggtgtccaactccaaagaaacgaattcaaagtaatataaaattgaacaagttttctacataagctattcaagatttctccagcactgactaatacaaagcacaatgagatggctcttttagaggcagcagctttagactcagaaaagggtgatgagatgagtttcatacggcaaaaaaataattttctttctttcaaggagggaggagagcaataagtgttcacttcaacataaggggtgcctgatccatcctgtgagtggatgggaaaggggttgagataggacaaaagtttggtctcagagatttcacaatcttaattcggtcacttctgatgaaaaagtaaagttgtccaaagatactttaaagctgaaaacctgaacagtatattttggggggtttcattctggctaactcctggaatcaccttttaaaaaattttatttatttatttatttttgagacaaggtctcactcagttgcccaggctggagtgcagtggcacaatcatggctcactgcagcctcagcctcccaggttcaagcaatcctcccatctcggcctcctgagtagctgggaccacaggcgtgagccaccatgcccagctaatttttcttttttttttttcttttttcttcttttttttttttgtagagaatgagtctctatattgccaaggctggtcttgagctcctagactaaagggatcctcatgcctcagcctcctgagtagctaggactacaggtacgtgccaccacacctggctaatttttaaaatttttttgtagagatgaggtattgctatgttgcctaggctggtcttgaactcctggcctcaagcgatcttccctcctgggcctcccaaagcactgggattacggtgtgagccataggcctggccctagtgcaactgttttgatgttgaatatgacaagtatctttttgaaataactagtctctccaaaaaaagaaaaagaaaaagaaaagaaaaaaagaaagttatggcagagaccaatttcttgggacatgggtttctcatgccattttttaccaacaatagtaagactgtttttctgcataaagaccttcctggagacagggggttctagaatgagagtgtctgttcatatacacctgctacaggtaggatttggttattgtttgaaaagtctagctgtaatacggctgtgcaggttgacaagaagaaactcattttctacaccgtggtagttgcatcttccagtgttgaaggagttggttagagaagcacttgggatccagtttatgtttcacaaaatcttgttttaaagatgctggaggaacataaggctgtgatcctacagaaatacgcacgggcgtggctggccagacgcagattccagagtatccgacgattcgtgcttaatattcagcttacttacagggtccagcgtttgcagaaaaagttggaagatcaggtaggtgctcatagtgcatcttttacatttactttttcttacatggctgtagtttgttctggagcagttccttagctgtgctattaaaatttatgccatgttaggaggttcagtttacgtggaccacctgagctaggaaacagaagtacactgtaaagggttgctatggtggtgtaggttgtatagttgtatactgcacaagtgtgcctacctcagagggcaggtggggctgagatccagcctggctccgcttgccaaggcaggtgttcctgtgtgaagttgtgttgccttgaggcaaaggtacctcctaatttgctcaaagatgctgtccgcatgccaagcgtgctgccttgggatgacatcagctcagaggagctgccatttctaattttcccacaggtgccttagggtctagctgcagccctgcctagtttgggaagattccccataccattcccactggtatgaaaagaaacatccaaggccgggcgtggtggctgacacctgtaatcccagcactttgggaggccatggggggcggatcacctgaggttgggacttcgagaccagcgtgaccaacattgcgaaatcccgtctctactaaaaatacaaaattagccgggcgtggtgatgcatgcctgtaatcccagctactctggaggctgaggcaagagaattgcttgaacctgggaggcagaggttgcagtaggccaagatggcgccactgcactccagcctgggcaacaagagcaaaactccatctcagaaaaaaacaaaagaaaagaaacatccagctgggtgcggtggctcacgcctgtaatcccagcactttgggaggctgaggcgggtggatcacgaggtcaggagatcgagaccatcctggctaacatggtgaaaccccgtctctactaaaaatacaaaaaattagccgggcgtggtggcgggcgcctgtagtcccagctactcaggaggctgaggcaggagaatggcatgaacctgggaggcggagcttgcagtgagccgagatcgcgccactgcactccagcctgggcaacagagaacgagactccatctcaaaaaacaggcaaaaaagaaaagaaaagaaaagaaacatccatatgctctcagttggtggggagggctatggaacacacagtgtctagatccgtaaaactcactcccaggcctgtctccactaattctgaggctctcctaaggtgagctttaaacttagccttaagctatatcataggggtcctgaatgaaagggtgagtgggtgaagaaatagacttggtgtctggtggggtttccctcattgtgctgttgtgtaacaagcctgcatgctacacagcttgtgcagaatagcacttaaaaatagccgcagccggccaggagcaatgcctggtgggagtcccaacgctgcctgagctctgtcctaggtgtgttagtttgctaggactgtcatagcaaagtatcactgactgggtggcttaaacaacagaaatttagtgtcttacagttttggaggctggaggtcccatatcaaggttttggcagggttggtttcttctgaggcctctctccttagcttgtagatggctgccacctccctctgtcttcacatgatcttccctccatgcctgtgtctgtgtcttaatccccttttcttctaaggacgccaatcttattggactagggctcaccctgagggctggttttaccttaattccctctctaaagaccctgtcttcaaaacagcgatattcctaaattcaggggttaggacttcaacaaatgaattttggcggggggcacagttcataacactagggttgtcctggtttgccagaattggaaacttcccacattaaaatagccaccagtttgggaagatgtgtacccagcaagatctgccatactgtttcaccacaaagaagatgctaacaaatgtcagtgcagtgataagtgtgatcagcataaagcaacctctcaaatttggatgctgtgtcaaaggctatgagaattaaatggaacagcatctttgtttggattaacctctaaacatctgaattttcttttctctagaacaaagaaaaccatgggctggtggagaagctgactagcctggctgctcttcgagctggggatgtggaaaagattcagaagctggaagcagaactagaaaaagcagccactcacaggcgaaattacgaggagaaggggaagagatacagggatgctgtggaagaggtcagctgcgggcgtgtgagacgggatggaaatatgcggactctctgtgaaaaagatgagcgctgccagcttttcctatgaagtggatttctgcagagcaaatcagattttgctatcaacttccattaccaaagggagcctaccttttaggaaaggcgagatcagaggattagagtctaggggaagggaggaggttaataatgagagaaatgcaacataggttttctctttctttcaagttttgcaaaatgatgacaggcccaaagagccctggctggctgcctccctttcttccaggatgaccttggtctcctatcacttgtccttaaggtctatgccctggaaatgtcttcccctgaacagcgatgcaaagctagggtagggttttcatctctggtgtagtgaaaagagcagtcagcataaaaaccagatgccctagattcaaatcttgcctttgtctggctgggcagccttggctaaagtcccttaccctctctgaattttagtttcctcatataaaaaaatgagaataacaaaaaaggactgacagaattgttgtgagaataaaatcatcagatgaaatacgttagccaaatgcctaccataatgaattttagtttcctcctatataaaatgagaataacaaaaagagattgacagaattgttgtgagaataaaatggtcagatgaaataatgtagccaaatgcctatggtgagtccctgcaaaagtgtgagctagtgtgttctaagaaggtgatctttattatcatccactctgctgcattttgttttttttttgtttttttagacggagtcttgctctgtcatccgggctggagtgcggtggcgcaatctcggctcactgcaacctccacctcccgggttcaagcaattctccttcctcagcctcccgagtagctgggattacaggcatgcgccatgacgcccggctaattttttgtatttttggtagaggtggggtttcaccatgttggccaagctggtctcgaactcctgacctccagtgatccacccccgcttggcctcccaaaatgcagggattacaggtgtgagccaccgtgcccagcctctgctgcattttcaaagtcctagcacccagggttggtggcttggaggcccagaagacatccctttgccctccccatgacccggtgctgggtgcaccaacactgctgccgtgggcatcgccagctgccagtcaccatcagtcagcaccacggggcctgctgccagcccagcagacactttaccaggagaagttgaaatgataggaatcctgctgtgctcacacatccttcctgagtcataacagttgcaaagtgtgaatcccctttacgccatcaactgtgtaatcatagcatattcgacatataaagtcccctggctattgagaagctcgacaaaaggaagaagtatgtccttgacattgaggagcccttgaatgtgtcctttctccttgtttcagtcattgctggccaggtcgggaatagtgtcacctttgaagtcacgttgagctcttgcatgtgaaacaaatggcagcgtcttacagtggctggtgctcgctgttatctatagacaggagctgagaaaaaataaactaatttaagaatatacatctttttgtgaagaaaggcaatggtgacaacttgaagtgaggttttcaaaaaagtttgtttttcccccttccctctgctagaaattggcaaagcttcagaagcataattcagaactggaaacacagaaagaacaaatacagctgaagcttcaagagaagactgaagagttaaaaggtaaagcttggggggcacaaatccagacattcactgatttagtcactcagtaaacaatactggggttgaccagttttagaaccaggggtctctggtgtacacttagtttagtgaggcaatttttgctcacaaggaatagccatatttaagtcgtggtaactttgccctacagattcgtctgttttatttctgtcttttgtcagacagcacagcatttcctctctgtgcctcagaacctcctgggccctttgcaaagtacagatggtcggaccatgagcccggagcttttgcatcaggaaatgggtgtgtgtgtgtctgtgtgtgcgcattcgtgtgtggtggtgtcagaggtggttcagacatctgtaattttagaaaacctttacggtaatcctgatgtacagtcagagtaatgctgcagtcatgtttggtgctcaccaaagatttgcagaaaaaattctgatctgtcggagttacttagcctaagtgacacccatgtcctctgctactgtcctgccctgaatgaagaagggcagaccctggaaccagtaggtatcacttcctttagggctgtggaacagctacgcttagcctagctctacacatttgagcttttcagctcaagttcaacttgacaatacttgttgtaccccagaaaaggcaacaggcaacagagcctggtgatccctgaccagatagtttaaatcaccactctcagtgatcttgcctagggatctcttccttgagctccaacgtgggggcagcaggaacacgagggttcaggcctggggattctacacgcacctctagcccagcaaatggtggatatgatggggcccagaggagtgcagagccctgggagttcagggcggagagtgggaggagcgaatgttggtgaagagggagtaaacagcctgacaccagggcactggggcaggaaaggctgtgcaggtgctgacgaggagcaggccatgccctcctgttctaggtgctgcgtgccctccaccctgtctctgtagggctgatggtgtgggcacagaagccatgtgaatgtcagagatgaacaggagcatgtcagaggtccgggagtaaaccttgaacctgagttaggaaagggtttcctcatctccaccctttttattacagcacactcctcttgggtggttgttttggcttttttcccccctaatttcaaatagaatttcccacaagggcatttaaattctcaggaatataacctgaaaattatgtttctgagaccatgtcatgtttgggtgaataattttacatcctcttccaaaaagtccatgaaaactttcaatgtaatatttataaactgattatcctgtgcgcctcccctgacatggcaaacagtgttttgtgaatagcaccaacctttacctatgcttgtgacctaagacccagggatgctatcaaatgctgtttctcctttttgagattctaacttaacatggacataatcccattcctcttgagaagtaaatcacattcgagcagcttctttagcgcatctgcaaatggcctaagatggtaagcaccagaattaaagccaatgcttttggttaattgaaaattgaggttatataaaacgtgttggcttctaaattaaagcttgagcatttcccccagtatttcctggctgccttacaacgttctgaagcagtcattttgattcagaaacatttggcactatgttagacaaactattaaactgttggctaaaaaaaaaaagtaatttggagaattgctatcgacagtgcaccccgaggactccttctggggtggggctcagaggtgaggtagagctcaaggatgagatatcagcttagtgcaaatagggacatcaccatttgaggggctgcactgccattctcccattttgatggcccctgtggcatatgggtgtgttgggaatgtggggttgtcatagccatggaacgtcctgcccttcggcctgcagactttgtgtttgcgactcttgtatttcagtgttaacagctgccttttttgtacttcctctttcccagatagagacagacacttgattattttcttggttatcacagatgagtggttctcagctttgctgccacctcaccccccagacatttgccaatgtctggaaacaatttgggttgtcacaactggagcagaggtgctactggcttctagagggtagaagccagggttgctgctcagaatcctgcaatgcgtgggacagcccctctccacagcaaagaattatccagcccaaagtagcaatagtgccaagaccgagaaaccttgtcacaaatggatcattttcttcccaaagggtttctatttatttattttatttttttttttttaaatttttttttttttttttttgagacggagtctcgctctgtcgcccaggctggagtgcagtggcgggatctcggctcactgcaagctccacctcccgggttcacgccattctcctgcctcagcctcccaagtagctgggactacaggcgcccgccactacgcccggctaattttttgtatttttagtagagacggggtttcaccgttttagccgggatggtcttgatctcctgacctcgtgatccgcccgcctcggcctcccaaagtgctgggattacaggcgtgagccaccgcgcccggcctctatttatttttaataatattcattgtctcaaagccaatatctactttaataaataacagaccaacaaaagtactataaatgaaactatttattgataattccaatctgacaaatttgtgagaattattattttgaaaccccctcatctttatttcttgtttataaaaaatgagctatactctcattgtaagtcctgttaataataaacatcacatgattgtcctgacattctcactttcttaaacataacatgaaacaatcaaggcattgatttggcagacatatctcaaaaagcattctctttttacagaaaaaatggacaacctcaccaagcagctctttgatgatgtacaaaaggaagaacggcaaagaatgtatggaatctagtttgccttaaagctactttctttcttctgtctgtgctgttttatattttccatctcagtttgcatatagcagacacagatacaagaaagtggggtgtgactgtttttaggaagtgagattagagatttatgagagctaagttccacaatgtgtactgtcagatactgaacacattctagactagtccataaagcttctgctgggtgggtacagtggaccaccaggaattcttttcttttcttttcttttcctttctttctttctcttctttctctctttccttccttctctcctcccttctttctctccttccttccttctctccttccttccttctctccttccttccttctctccttccttccttctctccttccttctttctctccttccttctttctttcttctttcattttctttcttttccttcctcccttcctcccttcctcccttccttcccttcctttccttcctttccttcctctccttttctttcttttctctttctttcttttcttttttttttactttattgctaagacagtgcaaaattcagagactaccaccaccttcaacttctaccaaatccaagaattaagattcttgcctaggaaataaacctccctcctttccttccccacctattgtccttgttagtttgtcttttatcccaaaagataaggtaagtaatggacctcacagaaattaaggcaggtgcctgaccttgtactgtaccagcccacctttcctatctcaatagcaaaccctttgctaacctccaaggactccaatctgggcttcccttctcttaaggagtcaaaggtttttagatctcaaagttggggtacatggcagggtcccggaaagagatagaacatgcttggcacatctcttttgggggctaggaagctcagggctgcctgtggtggtaggatacaaaacttccccatgcagtgagcaggacagcctgcgtctgggtgaggaagcaggattctaaagagaggagggaatatcacagaatcgctccaggagttaacaaatatatgaagtgtttcatgatcctccatcagtttttaaatatgtctaattaactcatttacctagaaaaatataattgtcgatgagtttttaatgtgaggagaagagctcggctctcggcatctgtccacgtgcagggaccacttgggagtgatcatttcaagcaggggtcttggagagccaggctgaggccaggtcattttgggctgtttgcaatcctaactgggtcagggcgaggcaggccagtgaagggattaaaactcttcaccctctctaggcccgtgttctgcctcctcattagcactcatctgtagcttggtttagtccctggtcagccaaggggggaattcctggcccctgtcaaaattctcaggaggctccaagaggcctgcagtctgtgggcaccctcctgaccagctcaggctgtgggtctaagattctttttacataagacttctgggccaggcgtactggctcacacctgtaatcccagcactttgggaggccaaggtgggcagatcacctgaggtcaggagtttgagaccaggctggccaacatggtgaaaccccgtatctactaaaaatacaaaaattggctgggcgtggtggcagatgcctgtaatcccagctacttgggaggctgaggcaggagaatcacttgaaaccgggaggcggaggtttcaatgagctgagattgcaccaccgcactcctgcctgggcgacagagtgagaccctgtctccaaaaaaaaaaaaaaaaaaggaagacttctggctgccttttcctttttcaaaggcattttactggtctcttgggagcactgcagtttttttttaaaaaacctggaaacaaagttcgttaatatctgtagaaaaaagaggttatgtgcagtgctcacacctgtaatcccagcactttgggaggccaaggcgggcagatcacctgaggtcaggagtttgagaccagtctggccaacatggcaaaaccccatctctactaaaaatacaaacattagctgggtgtggtgttgggcaccttataatcccagctactcgggaggctgaggcaggagaatcacttgaacccggggggcggaggttgcagtgagctgagatcatgccactgaagttcactccagcctgggtaaaagagcaaaactccatctcaaaaaaaaaaaaatctataaaaaagaaatcaaacaaatttattaggaatgtggctctctttctcagagtttttccctttgtgctataaaagcaagttttaaaaggaactgaaatgacagctcagcaggtagaatcatttagtaaactcatagagctcctggcactgcttcaagggcccctgtgggctgtgttgggcttgtctaggttatgtatctcttttcaattattttcttagttaatcatcaaatttttaattgagcaaccttctagagcagttggatttacatgcacttttgggcacgtggatttgctgccatttattctagaatttttgaagggctagacccctggacatagcagatagctctattgtttaggatcaaacaaacctccagcaggatccttggaacgaggaaggagccaggacttagcagagcacgccaaggtattcgctgaaggaaactggcccttccaggggactgcatggaacccggggggttgggaatacagtgccccaaaacccagtgtgtcttttaagttcagcctccctagccagtgtgccctgtgcgtgatcactgtaaagccacacctttcaaatcaggaggtgtaagaagttgtctttaacctaagggaagaggaaacagtttgctaaaaataaggccattacctgctggaactgtcacagtaggttctaattaacttgtctcctcttgttgttttcaaaatgatgtattctaattcaaagtaaagactgtagagacaattctaaattattttcttcttttttagggggtgttgtggggagggtctcactctgtcacccagattgaagtgcagtggcacgatctcagctcactgcagcctggacctcctgggctcaagcgattcatccacctcagcctcctgggtagctgggactacaggcgtgctccaccacacctgactaatttttgtatttttagtggggacggggtctctcttgttgcccaggctagtcttgaactcctgggctcaagggatccgcctgccttggcctcccaaagtgctgggattacaggtttcagccaccatgctcagctctaaattttcttcttttgctgcgtaggcttcttgaaaaaagttttgaactgaaaacacaagactatgagaagcagattcagtctttgaaagaagaaattaaagctctcaaggatgagaagatgcaactccaacacctggtggagggggagcacgtcacttctgatggcttgaaggcggaagtggcccgcctgagcaagcaggtcaaggtagagcggctctcacgttcagccccgccctctggttacgtcatttgattgcaattccaagttcccacagattagacagctaaaagcatctgtgtaaaggccacaggcaactggagcctgattccttcagtccttccaactgtgcacctccaggctgcctttgatttagcaatcattgtattccatattttaaaagtcaactttctaacttttttgaaattacatttatgtaaagttatttaaatatgtcgatgtagagaatactcccaaattagactgtaaattgaggtgaatccttattatataatccatcactataaatctataaacacctgcattaaagttaagttaccttattatcaaaatctttcatttaaactgttattagaaaatttactaaaacaattatccaatgcacagtgtggtgaatgtagttaataagagcatattgtacattcaaaattgctatgagtaaatcttaaatgttctcaccacaaaaaatgacaagtatttgaggtgataacatgttaatcagcttgaattattccacaatatattcataaattataacatcaataaagctataaattttcaatggtagaaatttttaagtaaatttttataaagctgagaaggaaaaatcacatagaatttttaaaactgcataatcatatataaaaatattgttacctgccgggcacggtggctcaggcctgtaatcccagcactttgggaggccaaggcaggtggatcatgaggtcaggggttctagaccagcctgaccaacatggtgaaaccctgtctctactaaaaatacaaaaattggctgggcgtggtggcaggtgcctgtaatcccagctactcaggaggctgaggcaggagaattgcttgaacctgggaggcggaggttgcagtgagccgagatcgcgccactgcactccagcctgggtgacagaccgagactccgtctcaaaaaaaaaaaaaattgttacctgtatctatcattaaaaatatataaatattcctgggcaatttaataaaatgctcttgagaaaaatgaatgaatggatgaagtaatgatccatgcttggacaatcaaggcttaagtgaattgtttccctaccagaaaagttaaacctgagtgtacctacgttcttaaatgtaagacatttcatcattaagttggaaagcttttaagcttctactaaatatgtgaaatacatattagtagagtatttgtaggattatggaaatagtctctgtaattgtcatgaactagccatgcgtggtttagaagagcttttggaattgcatccgggtggccactgaattccacaactgaagtgtctgtcttttctgggccccgtcccctattgtttaaaagtaggaggtcagaccacatgatcaggaagggtcactttcattcctgtgactgcttcactcttagcagccacatgagcctgatgtcagtcagtctgtgggagtcctgtcatctggctgaggtctgaggtctgtatcttaaatgtaggaacttgtgagactgcgcttgcagagaggtaccagtaggtgtcactcacttcctctttggtagctaagactggttcactctccaatgtgatccattaagattacttggggctgggcacggtggctcaggcctgtaatcccagcactttgggagactgaggtgggcggatcacgaggtcaggagatcaagaccatcctagttaacacggtgaaaccccatctctactagaaaaaaaaaaaaaaattagccgggcgaggtagcacacacctgtagtcccagctactcgggaggctgaggcaggagggtcgcttgaacctgggaggtggaggttgcagtgagccgagattgcaccactgaactccagcctgggtgacagagtgagactccgtctcaacaaaaaaaaaaaaaaaaaaattactctgggtttttgtgttttgttttttgggttttttttgagacagagttttgctcttgtcacccaggctggagtgcaatggcaccatcttggctcactgcaacctgcctcccaggttcaagcgattctcatgcctcagcctcccaggtagctgggattacaggcatctgccaccacacctggctaatttttttttgtatttttagtagagacagggtttcaccatgttggccaggctggtcctgaagtcctgacctcaggtgatccacccgcactagcctcccaaagtgctgagattacaggcgtgagccaccgtgcccagcctactctggttttcaaagaaaataactcatgatcatcaagttatatgtgttatagtcagtcttaaaagcctaagtaaatgcaaatctgacttggaacatttactgaaacattacaaagaaaagcatggccttcaggatttggatagtcctgagtcccccataaacctggcatgtgaccctgaacgtgccagtcagccttcagttaaatgtagctgctgtttgctaattgagaaaagatcactctacttacctcataggcctgttaggaggattaggtcttctaggtaaagtgctcagcacatatcagtttgattctcctgcttactctctgtagaaacaggggctggagcccttaaatactcagggtaactgaaaaaatatcaaggagagtttattcacctctgctgtccctgaaagtccttatatctccctcagatacaaagcaaaagcacagacctgtgattcttattcaagctgagctcacaagggagaataaaggcagaatactgcctcttccccacaaccagagctgcccaggccacctccttcccaacagccagctaactcccagacctcctggactcaccagtctctgccactgctccacatctaagctgagctgaagccaaaacccacagttatgaaggtggcaactttgcccatgtccttgcactcaatattttattatccattaaaagagaattttagcccgtgattttacctttctcagtcttccccctgtcccaccccaccccaagcttatagtaggtatttttttttctttatgtaacagggaagttaatttttttttttttcgaggtggagttttgctcttgttccccaggctggagtgcaatggtgcagtctcagctcactaaaacctctgcctcccgggttcaagcgattctcctgcctcagcctcccaagtagctaggattacaggcgtctgccaccatgcctggctaatttttgtatttttagtagagatgggattttaccatgttggtcaggctggtctcaaactcctgaactcaggtgatccacctgcctcagcctcccaaagtgctgggattacaggtgtgagccaccatgcctggcccagggaagttagttctactgatacaacccattagatctggcattttgagtagttaagcatgcttcaaggccaagctgtgtaggcagtgatggtttaacaagattttagctaagaaagaaactgcagtgaggatgtcttgcatagacacgcaacgctgtaattgtgttccctttgtcttatataaagcataatcgttgttttttctttacctgattccgtcattgctgggattcagacaatctctgagttcgaaaaagagatagaactacttcaggcacagaagatagatgtggagaaacatgtgcagtcacaaaaacgggaaatgagaggtaataaaaatatgagtctcttagtccatgggtgcagactgaatttatcatagctgtgtcgctgctaaggaaacgtgtcctttggtatgaatttggttggacatatggtagattgcttagttgataggttgaatagctagttggttgaatacctggaagattggttagttggttgattggatagctggtgagttatttagctggagactgtgaagctagaaaactgggccctggaaagggaatgggaaaagataaatcatccacaaatgtaatatatacaactctgcctttccctttcagaaaagatgtcagagatcaccaaacaacttctcgaaagctatgacattgaagatgtaagaagcaggtaatcatttttgcattatcaaacattttaagacatgtaaacatgtaaaacgtgacagagatgatagattttcttatcttccttattttgcaggctctctgtggaagatctggaacatttaaatgaggatggagaactttggtttgcttatgaaggactaaagaaagcaacacggttagaaattctcctcagggatcttctttatttttcagagataataaatagactattggaaagtccaaagtttaccttacatagattgatacacaaattccttatagtagaatgactgaataaccactagaaatatttctctgagaagtaagtaattagcttattcatgaagagcaatctctttgtgggataaaatgcctagtaaaaaaccccataacccatacagtgaaaactgattatcaaataagttagttaatgttgccagaaatatgtagatacatttaaatttaaggcatgtgctgcatttatttaaattaataaactttatttttcacagcagttttaggttcacatcaaagttgagcagaaatacagagagttcccatatatccctgccaccacacacacacaacctcccccactgtcaacttcccaaaccacagtgatgtgtttactatgactggtgaaccaacactgacacgccactgtcacctcaagtctatagtttacattagagttcactcttggtgtacattctgtaggttttgacaaatgtataatgactcgtatccacaactgtagtatcatacagaacatgttttgttttgttttgtttctgagatggagtctcgctctgttacccaggctggagtgcagtggcaagatcttggctcaccgcaacctccacctccaggtttcaagcgatttgcgtgcctcagcctcccaagtagctggaactacaggcatgcgctaccacacctggctaatttttgtatttttagtagagacgggatttcaccatgttgtctaggctggtctcaaactcctgacctcaagtgatccgcccacctcggcctcccaaaatcctgggattacaggtgtgagccactgcgtctggccagtattttttaaactattaagagtgtaaaaatataataacttctaaaattttcttcattgttaactacatattaacccccacataatgcttcctaactagctagaagattttataattaggcattcctgattctgtagcctgtaaccgtgagtgcataagtaaacttgatgtacttcgtgcacggctcttgttgtgggtcttcataactgcctcccagcagtccataaaacagaacaaaggccatgtggtttatttcttgacccctcctttaatagtgttttggagagccatttccagtctcagaaggattgctatgaaaaggagattgaagctttgaacttcaaagtggtgcatctcagtcaagaaatcaaccacctgcagaagttattcagagaagaaaatgacatcaatgaaagcatccgtcatgaagttaccaggctaacatcagagaacatggtatggtctcagccaggggccccagtcgtggccatcatactagagttgttctttgtcagtggagtcaaattcagtttcttggcagtaaaagagtggatataaattactttttccagaagtgaaataacttggtctggtgattaaactataaaatgactgcagaccagagagcactctgatacaagagtgtgtgtgttcaccacaggatggctgcaggcgctgtgattgtctgtgtgtgcgcgtaagtgtgtatgttttaaagcctgtatatttaaatcaagccctaaccccttggaaagtgaccacaaaattgaagggtagctcttgagacaggagtgtgtcagaaggccagtcctgctcatgcctgaaatctcacctttttttttttttttgagatgaagtctcactctgttgcccaggctggagtgcaatggcatgatctcagctcactgcaacctccgcctcccaggttcaagcaattctcctgcctcagcctcccgagtagctgggattacaggcgcccaccatcacggtcagctaattttgcatttttagtagagacagggtttcactatgtgggcaaggctagtctcgaactcctgacctcgtgatccgcctgcctcagcctcccaaagtggcataagccaccgtgcccggccttcaaatctcaccttttcaagggcttcctcttccatgacgtgcattcctagccactgcatttgtctcattctttcttccaactcatgcctactggcctggagaaatgctttaggaatctcctcattcaaaaagccatctctgtcttaaccccacactgctgtggccatcacccatttctttggggtcttagtcagacttacaaagaccctctaggcatacttcctccgcacacctcccattcactgcccaccaccccattctgtcgtgtgtccccaccactggctgactctgcctgcacagagctgagcactaagggttcctttgcaccctcatcttactcagtgtctcagcagcctctggcgatgctaatcttgccctctctgccttgttctcttggcttccaggacgccccgctctcccagcattcttgtcccgcctcactggctgctgctcccctacttccttactaccccctcctctccctaaactgagagtgttaggaaatctcggggctgtagcagcagttgaggaccaggggtggacacagggaacggtagtgggggacctttacatctttgtttattccttggatgaaactttaatgaggaatttgcagtgagacccaattgcacattcaaacaagtacagatgctcctcagcttaccatggggctacgtcccaataaacccatcgtatgctggaagtattgtattgtaagttgaaaatgcatataatacacctgacctaccaagcatcgtagcttagcccagcctgccttaaacgtgctcagaatgcttacattagcctgtacttgggcaaaatcatctaacacaaagcctatttttataataaagtgttgaatgtctcatgtaacttatcaaatactatactgaaagtgaaacacagaatggttgaatgggtacttgaagtatggtttctactaaatgcatatcactttcacaccatcacaaactcgaaaaatagtaagttgagccatcgtaaatcaggggctgtctgtattcttcatttagacttcagaggcctggatctcagccactcagttttaaaatgagcatgtttataaacttggggaaggaaaaaaaaccctgttttaacctaactgggggtggaggcgatggacatgtaaagaaatatacagatagggacaaaggattgagaaacttaccgggtgattccagacctccactaacagagcagtgcatgtccttgaattcaaaagtagcagtgggaccctttgagatggcttttcctgttcctagatgaggagacgatggctctgggcttggaccaaagacgctggctgccatttcttcacctaattcctccctcaactcagcataggatttctatacatgtacacatccttctctccctgtcgtagctgtgtgagaactgcttcctctgagcatactggtgtttcctgagactatataggttttgaggttaaaaaaaaatgttaatccagtctaatgtcgtggctagctcttttacacagctatctgttctgcaggctgaacaccaagatagttcagtttgcttctaagattttaaagttcatagataaaagtattttatattctaatatttctaattcttctctaaagatgatcccagactttaaacagcaaatttcagaattggagaaacagaagcaagatcttgaaatccgcctgaatgaacaagctgagaaaatgaaaggtaactgaaaccctcattaacctgcttttagaaaacggtttcctgtaccccggaaatgacattgaaatgtccttgtactcagggcttttaaactctggttctctagggggctgggcaggtaacaaatgtgagaagggggctagttgaaagatatgggaaggtatgtaggacatttaaaggaggtgcaggctgagtgcagtggcttacacctataatcccagcactttgggaagcggtgatgggtggatcatttaaggccaggagttcgagtttgagaccagtctgggcaatatgatgaaacctcatctctacaaaaaaaaatttttttttttttttgagactgagtttcgcccttgcccaggctagaatgcaatggtgcgatttcggctcactggagcctccgcctcccgggttcaagtgattctcctgccacagcctcctgagtatatcaaattacaggcacccaccaccacacccagctaatttttttttttttgtatttttagtagagatggggtttcgccatgttggccaggttggtcttgagctcctggcctcaggtgatccacctaccttggcttcccgatgttctgggattacagccgtgagctactgaacccagcccaaaaatttttttaaaataagtcaggcttggcagtatgcgcctgtagtcccagctatgtgggagactgaagtggaaggattacttgagcccgggaggtgatggctgaagtgagccgtggttgtgccactgcattccagcctgggtgacagagtgagatcctgtctctgaaaaaacatacaaaaaaataaacaggctgctgcctccaagctccactgattgttgcccagtgggaatgtgggcccagtattgctagagattcctatttttaaagaaaacccaggaatccagatttttatgtggaatatttatgtggaacaatttttaaatgatggtttaaaaatgtttaaacattgttcagaccaaataaaagttaatctctgtctggatacagtttaagacaagcttgttcaagccgcagcctataggccacatgcagcccatgacagctttcagggaggcccaatacaaattcgtaaactttcttaaaacatgagatttttttgcagttttgtttttcagctcatcagctattgttagtgttagtgtattttatatgtggcccaagacaattcttcttccaatatgggccagagaagccaaaagatcggacacccctagtttaggacctctaaaaattgaaaataataccaaacccaaatcagaatgcagtgatatgtgcccccccaaagtactgacagttcttctcattataggaaaactagaagaattgtctaatcagttacatcgcagtcaagaggaggaaggaacacaaagaaagtaagtgtaaatatgtgtgtacctcaagttcatgctcgtgtaatgcttttctgaaactgtagaatataccaagatgtgttactaatgccaaaaagcaagatgctaattaatatatatgacatattgccattctgatgggaaggaaagaaatatgtgtatgtacaacacactcagcagcagcagcatctctgggagattgttaaggaacaaaacattggttgcctccaggcagttggttgccttcaggcttggtgactgatacacagaggaggggaggacacgtacttttcactgtatgcgtacacttttgtacccttgaaatgctataccatgcacttgaattatctgttcaaacaacagataagagtgtgtgagagaggacggtttctattagcagactatttagggtaagaattaaaagcccatgttgatggaaaatcttcattgctaatccccccaaatttccatcacgagaccaataaagggcctcatgccctggcagagccttgtggggagaatgttctgttttgttgccaacttgttgagacacttatttttccaaaataataaatgggcacttgacatccccaagagcatctttagttatgtgactttatcagtaggatgaggacccaaagtagtggaaaaggagcgaggcaccattttggaactcttctaatggtctctcctcctctcttctgtctgatccctggctttgtgagtgtctggtccccaggctggtcacaaaggggatgactgcttagctgtcacagcgtatggtgggcgtggatgtcccatgggaacagtaagtggggctgaggttgggtggagaatggaactcttattgggggaaggagaccagagcagtccatggacagttttctatcccagccagtcctggtctcttttctttcccctggaaggacacccctattcgaatactatttgctttacacagaaattggccaaggtgttcttccatctttggaaatatcagcacttgctatgacagtgagtgacttctccatgaccgtcatactgataccagccattcctccctccctttctcagggccttggaagcccaaaatgaaatacataccaaagagaaggagaagctgattgataagattcaagaaatgcaggaggccagtgaccacttgaagaaacaatttgaaactgaaagtgaagtcaagtgtaacttccggcaggaagcatcccggctcactttggaaaacagggtgagaagtcttctaacttggtgataaagactgtctgtgtgcagatgttgctgaaaggggggacatgccacctaaagcatatgattaacatctatagaccaaaagtccttccatcagagcagtctgttttcttatcccaaaagacaggtggtctctgaggttggctttgggaaggccttggggacttacaggcccgcctggggagggtgaaggaggagagacagagaggtgcaggccgtagttccccagcactatcagtgcacggcaccacccaggatggagtcactgtgctctggaacacactgaggatagcaaggcctacgtgtgagtgctttacccagcaaaactcaccccatataagtgcccatgctttcttctgggggtatggccttcctacaatttttagagtcaaaatgttcttctatgaaatgatcatgatgtcgatggaaggcttaaaaactttttaaaagtgtttaaggtcttttctgagttttaaatgcccttaccaaaatgaaatcgggtaaccttacatcaattcccagcaattattttgaaattgtgatgctgtgtggaacccagaagactgagaagtgctgaagtgacaggccactttcctaggagctgggaccctctcgggccccttcgaaacctgagagcttccagcttccaagagggtaacgcaggagggctgacgagtccagtgggtcagtgtggacatgcccacgtacccttctccctgctgacagggcccccatttccaatctcacaggaaaaccttgatagaggaaaaacatattttgagtgtcagggtttaactttgaagagtggttacatccaaaaagagaaattccaggagtttgacatttaataggaagtaacaaattccaatcagtgacacctacatgacagctgccttttctgaggtggatacaactttctcagagactggaatcctcgtgttacaacagagaagcaaccgcctgttgtccatgtgtgaggctgccttgccttgccttgcctcctgtgggcccctgggatctcaatggagtcagcggtcagggagaagctacatgggtgggtcatgtgtgtgctgcgcatgtcatcccatgtgatcctttactctgactgtccctgtgcattgtgacggatttatgagttcgttcctggtgccctggagcacagctcggtcctggcgccctcttctggagctcctccaagtgtctggctctgctccccacaggtgcgctgagctaaggagctggcaggcctgacatgctcatttcaatagctctttctgaacccggagtagcctcactgttacatagaagcagacggacacacaacaagagtatcatctctatacattagccggcggattctacccacaaatgagacctgatctgtattagtttgccagggctgctgtaacaaatgaccacaaaccaggtgctttaaaacaacagaaatgtgttctctcaattatggaggtcagaagtctgaagtcaaggtgtcagcagggcacactcctccgaagtctctaaggaaaacccttccttgcctctcccagcttctagagggctccaggcattccttggtttggaacagtgtaactccagcctctgcctctctgcacctggccttctccctgtctctgtgttcttttccatctgttataaggacacctgcattggatttacagcccaccctaaattgtagtagccacctctcatactgacccttagcttaccacagctgcaaagaccctatttccatataaaggcacattctggagtttgggttggacatgaatttcaaggtgacactgttcaaaccactatgtgatgctttgagtcaaagaaatttcttttttttttccagactcttttgtcactgaattcttattaagagattaaaaaaaaacttttagtaatcatttcactatttatcaaagaaattcaaaatcaaaactaggtactatttttgcctgtcaaattaacagagacctgggcctggcacagtggctcatgcctgtaatcccagcactttaagatgtcatggcagaagtatgacttgaggccaggagttcaaccagccagggcaacgtagtgagaccccatctctacaaggaaaactttaaaaatatatatatagtggtgcatgcctgtagctctggctactcaggaggctgaggcaagaggactgcttgagcccaggagattgaggctgcagtgagctatgatcacactactgcactccagcctggatgacagagcaaaatcctgtctctaaaaatactactactactactaataataattaatagagatcttatgctgctggagagaacatcttgaaatgggcactgtcatacatggttgctgggaatataaattggtataaactttcttgagggcttatttgaaggtatggatcatgaacctttggaaagtacattccctttgactcagtaacacaacttgtaaggttctatcctaagtaaatacttgaacatgtggacgagatttttgttcagagtgatcatcttagtgttattaatcatagagaaaaaaagcaacccaaaggagagaaatgcatacctaacaatagagcaaaggttaaattgttgtatgatataatatgacttggctgttaaaatgatggtttgagtatattatcaatgacatgggaaaacgtctgcagtataactagagaaaaatgtaggatttgaaattttgcatgtaatatgatcccaattttataaaatgtacatttaccatattgggaaaaaaggaatgaaatcaaaatgtgaagagtggtttttttctgggttatgggttgatgggtgacccattttattagatatattataagatgggcttgaattggagggaggaagctgtactgacaccgccacttctaaggtcaatagagttcctaacatgtctagccagggacacagaatggtggcagggagagaggtggccgcacagagtagaaacagcacaatgtccctcggccccaagagtccctagagggcacacagctgcagtgaccctgcatggtgggtctttctgggtcagagaagcctgaattctatatgtgtcaaatgctcagatgtggaagaacttaaacactatgtcctttataggaaatatttctaggtatccaaggactcttctggttcttgagccaaattcagcatgggcaaggccacctacttatcaggaaagaaaggcaaaaccaggcccaaatctctgaacatttctctagctccagcttctgaaatctagaaagcccattttcccacattcatatttttaaattctctatgatgggcactcctatgtaataagagcaagataaatgtagtatatgcatacaataggatattattcagccatacgaatatatgaaatgctgatacatgctacgacatggatgaattttgaaaaccttatgctaagtgaaagaagccagacacacacacaaaaaacctattctatgaatttatttatatgagatgtccagaataggcaaatccatagagacagaaagtagatgagtggttgccaggtgctggaaggtaatgagaaactagagagtgacactaaaggtcagttttatttttggagtaataaaatgttctggaattaaataatgatgattgtagcacaactctgactacactaaaaaacctttgagtttacactttaaatgggtgagttgtacggtatgcaaattgtatgtcaataaagctgttacccaaaaaaaaaaaaaaatagattaaagtgcttctaagctaaatcctggtttctttttattgctgtaggatcttgaagaagaattagacatgaaagacagagtgattaaaaagctacaagatcaagtcaagacactaagcaagacaattggaaaaggtaagaaacaatacttgttttcttattcttttgagctaaggctaacatgcgctcaagtgtttattttctttctggtccaaagcttatgaaacccaaaggaatgattctcaagtggtgaggtttgtgacctagtgctgggctaacgaaaggatcctttgggtcaggaagacagctccctcccactcagatgataccagatacattcatgtactcgcaagagacatcctataattaacacattaacctcttcctctgttagctcccttttttaaaaaatgaaattgtgaacaatttttcaatttactgctttgaaattcaccttctctccctgttacatatgtaggatcagtaagtatccaaatttctattagaaaagtagagagctaagaagcagacatcctgaacatggactgcatggcacacataaagcatcctcgtgagcctctgtgaaagggaccctcctcccttcttccctccttctgcttctgtcactgaacttttctgtgttcagctcctgctcacatttctcactctttcattctttattaccttttccccttcctcccagccttactgccaaggctgtatcttgtttctttttctatattcatctctttgaagagcagctttattcttacttatccaactctcacctcaaatttgaaatgtccacaagcaaactgaggatccctttccttcagtaataaatgacaaatggcagtctgccccatgagagcagggcccaggtctgtgcttcccagcccccgctgcatccccactgctgggatgaatgaatgaaccaccattcaccaccctggctcacctttcagacttctgacctccagagctgtacgattaaacatttgtgttgttttaagcctctatgtttgtgataactttacagcagccacaggaaactaatacagctgtctcagtaaggatcatgcacattggtattttgcacaccaaatgtttcacaagtcttctttcacagtagcattggcatcttgaagacaaggcaacatcttggatttctttcctgttaccatgtgctggatacatatcaggcactcataaggctcttcaaaggataattgggccttttcagcagcagctgtactcactgatgtactcataaagaggaatcactacttggagaaattcttcaggatacaatacagtacagttttaatgtatctgaaagccacagacatttacgtgcaaaccagccagaatggggtaggagagtagtcacattgtgagacctgtgaaagctgcttttgtgtatttagctgattgtttgcctctgtctacagccaatgatgtgcactcgtcctcaggacccaaggagtaccttggaatgctgcaatacaagagagaagacgaggccaagctcattcagaacctcattcttggtagtgaaacctggaactctggatttttgctttctctttgagaacttgcatatcagtcagtgccaaagtcctgggcaggggtggtcctttttctactttttcttccactgcttcttcccccagcccagagtttctcaacctcagcactgttgacctgttaactctgtgaatggggagtaacaaaggatggagcagcatccttgacttctactcactagaaggcagcagcaacccctagtgatgacaataaaagatatctccaggtattgccgaatgtcctgtgggggccaaaactgtcctcagttgagaaccactgccctgaccttttccaaattgtaggaccagggtagaagagaaacatcacctcatttttgtgtctcagcacaggagccatcatggaagcaattgtggctctgtgctccatttgacttctgagaaatttctctgcgggcaatgtgatggggcttcccagccatgcctcagttacaggaatgtcccatgtgcatgctcaagagttggtggtcatagaaccaatcttactgcactgtcttcactgtgaccttccacgtggttttctggcatagggagaaaaatctgcctccctgtcagctggccccaagatctcaaaacagaaagccaacgtgtagccttccttcctcttctgcgagtgacccccttggctcatatgagcacctctacccttttctttcccctcatcactggtgtcatgcagtgtgagcctcttctttgttcttctgtcttcctgcagccaggggacatccttgtttgcttatcttaactttttttgtaagatttctctctccccttcatccccactgagcgtttccaccattctgttctcctcaaggccagccaggcatcctctgctgcactgggtgtgcctgctttccctattcaaggcagcttcatgtgactgtggacactgtacgccatcctcatcaaagcgcttggagtaggggtgcatggaatggagtttctttcttacaatgggggtctgaaatccagggtttccacaccagggaaaaataaagattctgtctcttattcaaccttttaagaaagagaaagtcctttgtaaacaagaagaggaacaagtgacacctgtgtatcttgtgccaagaaaggagccagatggaattcctcaaagaggaaataaatccatatacattcaggcactgtgtcaagcacagaaaagcaaacaagcccctgcccctagtcacaggttccttaggagaagagctgacctgtcagctgtaatcctcattggctctctctgcttcagacttgaagccccgtggcgtggtggtgaacatgatccccgggctgccggctcatatcctgttcatgtgtgtgcgctacgcagactctctgaatgatgccaacatgctgaagtccctcatgaacagcaccattaatggcatcaagcaggtggttaaggtaggaaatgcctttgacattggcccctggtatcacatctatgggaatgaccagatgcccagtctttgcccatcctgagcctccattgtgtggtgagccacatgattcctcaaacaagtttgaggcccaactagtgaagggagccacactgttagggaaagataaatggatgagcatctgccataggcctcaaagccttaccggcgagactgcaacctggtagccactgccccaccactgctatccccttagggtgtaaagttatcagctgtgaggggtataggttctatctctgtaacaagggtaaatcatgagaaatgaaatggagtgaaaaattattcatctcttcccttggcaattatataattcttcttcctaaaagcacattgtgtatttttattcccagtccacaaatgaagatgaactgtgtattagttaggttagttacttagtaaagttaagctattgtagctatgagacacctgccacctccctttgcccaatatacagtgtcttaaagaagatggaggatttttctttgctgatagcggttccataatgagccatctaggttggaaggtggctctgttccacgtgatcatgaagggacccaggttccttccaacttgctgttggccattccctaagtcggtgtccttattggaatgactggacaagcaggcagccagcagtttaccactgggcaagagggaacctaccataggacacagaccatgtgtgtatggtatacatatcagaagtcaccaactgaactctttatgagcaatcatctcttcatggtgtgacaagtggataatgatcaaaagtgacaatgacaaagggcgggattttgtgaaggctaacagtaacataaagtttattgctaatttcctttccaactgaaacataatcctaaaatcattcttagcatactgattatttttcctggaaactccataagtgatcaatgagtaaataactgtatctaagcattgaagatttttttaagcagacctggatccttgcttacagggatagttgctttgtaaaaagagttctctggtaatgcttggcgcattctggaatcttgggtgtgggtagggtggttgacttagttctaagccagacctggtgctaccctgaatgtggaaattccattagccacagtggagttagtacaaaaaccttctctctctctctttttctaggaaatgaccagtttacagttatgttaaaaagtacccgtttctgggaattacaatgtactgatccatattggaagggggcaataagacataaataacactaaaataacagtgttttccatgcccctccaaaagagaagtgatgtttgatattaggatatatttgaatttttagttagggagaccctacctcatttttagtaaaatatgtgttctaaagagtaatggggaattaaattctattttaaatactctagggaaggccaggtgtggtggctcacacctgtaatcccagcactttgggaggctgaggcaggtagatcgcttgagctcacaagttcaagaccagcctgggcaacatggcaaaaccctgtttctacaaaaaagacaaaaattggccaggtgcggtggtgtgtgcctgtagtcccagctactcaggaagctgaggtgggaagatcacttgagcccggaaggcagaggttgcagtaagccaagatcacaccactgcactccagcctgggtgatagagccagaccttgtctcaaaaataaataaataaattaattaattaataaactctaggaagaaagaaatataaaaactagatttgtgagagatcagagtatggtaattctcctctccttccaaaaatatcatgaattcattatttatctggagttaggaatagaaaattcacatttgtttggtgctggatactttatagtcaccatcttcacaggagccaccacagtgtttttggaaggggctcccataaattgatgttttccctgtccatatttgcataaattgggttttcttaagacaagctggcattgtgttccagcccaggacacacagtatttgcttccccttgatgctctggaatgtttcgccaaatattcataaatcaagagatgtgtggtatgaggactataagacccctttctcaccagcatcttcagtctcaacttctctgtgtccccctccctctgcctttgcatgtgcccaggacctgcctctccccacctccagcacacagcagttacagcaatgtgcccatataccctcttcagccactattcctttccctccaccccggactgccaaagtgcttaaactagtgttctccaccaattctctttgtcactccttgcaatctggcttctaacccatcactctacagagagatcaccagtaactcctcttactaaaaccagtggtgtttctttactttttattctctctaaattgaccaaagcattagcaccatctccttgaaagcttcctcccttgtcttttaaatcccaggattttctctgttttcccctctgatcactgtagctctgccttcactgcttgttcctcttcttcctgccctgtaagtggaggccttctccccaacagtcctagtcctgagctcttgtctctccacccatttccctcaaaggctagacctccttcctctctgaggtttccctggctgctctgcctccccatcctctctcctcgtcctctgagctttggtagcacagtctacagccatcgtatgggctcttgaccacctactaaaactctgttctatcttcccagtgagagtgtgaacttaggagagcaagaagtgaaacttgcatttctcatgcattccttcaggacccacttcacacttcataatgagtgacacaacctgtacagaaacatgttacaaactgtgacctattaaataaatataagttcttataagtataatatgaattggataaaggctttagtgaataaaagaaaaactaattttggtcaaaagctacaaataaccaaacaggtaaatgctcagaggtacaagtaatcatcaagaccaattttgtcttttcttattttcctaaggaacatttagaagactttgaaatgctgtccttttggctttccaacacttgtcattttctcaattgcctgaagcagtacagcggagaagaggtagggggcgcccacctgcttgttgttttgtgctgacagccagtctataacctcctcctgagccagagctcaatagagcctctatcctctccaccaggaggccaacagcacattatctgttggactcttgggcatacaccacaggcaggagacttctggaagcagcttagattttgggcatggtactaggcctcctaggtctccattacttttaaatcaataggtagataagatgacttttaagtttccttctggctgtaagacgtttagcattatgactctaaaatacaggctttggtttaaaatgcctgtttcttcacagctgttctctctacaggaccctgactgttcctccataatctataaatatgtttcctttgccattccgactctgcttccaggaggctgatgtcatgaaagagttctccaccttcaagtactcacagagaaaaatttcattgaactaaaataacaaagtggctttcagggttttcagtgctctccaaaatggctgtaccattgcacagccccaccagcagtgtatgatgtttccagtgtctcataccttcaccaacacttggtattgacagacatttttatcctttaccagtgtcagggtataaaattatatcttgttgacttaaattgcatttatttggtcactagtgaagtcaagcataattttatatgtttattggtcatttgggtttccttttgaattgcctagtcacatccttcctttctttttcttagggttggtttttttgttactgatttgtaggaggtctttatatcatatggatagactgtagcttagcttctaattttccttatgaagtcccttgtcacacagtttttgaattttgatatgcttaaatctgtcaatcctattcttttatgatttgtgtcttaagaaattcttccctgccctgagatcatgaagatcctcttctaaacttttgtagttcatatttagagttcacaattaattatgtttttacctatccaaaattggtatgtaaggtaatgatctaatatcctcttccatatagataaccagttgtcccaatggaaggaagttaaaataaaatataacagcaatctgtctagtactatagaacaaaaggagaagtaaagaaaatccaacctctgactaaaaggaataccaaaacaggaggaggcacagactagtccgtttacaacaaactggcatctgtgagacatcagtggaagaatgttttattcagcactgttttatgatcctttctttgcccccttcagccatgtatagaatattcttttccctgtctgactgctttttcagttaccatatttttatttctaaaatttctcttgttccttttcacctctgtctcttaccacaatgtcctgttcttttttttttttctttttcttttttgagatgggggtctcactctgtcacccaggctggagtacagtggcacgatcttggctcactgcaacctttgcttcccaggttcaagcaattctcctgcctcagcctcctgagtagctgtggctacaggcatgcgccaccatgcccggttaatttttgtatttttaatagagatggggtttcaccatgttggccaggctggtcttgaactcctgacttcaagtgatccgcctgcctcggcctcgcaaagtgctggattacaggcgtaagccaccacgcccagccctataatgttctattcttaattttttctttttctttagtctctttgaacatgttaaacatattccattagttcactcaggctactataacaaaataccgcaggctgggtggcttaaacaagagatttgtttcctcacagttctggaggctaaacatctgagatcagggtgccagcatggtcacttcctggtgagggctctcttcctggcttgctgacagccactttctccatccctgtgtcctcacaggacctttcctgggtgcatgggtcaggaagagggagagagagggcaagctctctctggtgtctcttcttataaggacatcaatcttattattagatcacggccctatcctcatgacctcatttaacctcattacctccctaaaggccccatctccaaatacagccacactagggggttagggcttcaatgtatgatttttaggaagacacataaaatccataacacacactttaaaatatttcaactttgtaccctgtaaattataaggttatgaatctcatttattgtatccacttacctcttcatagcagtttgtttccttgaatgctctgcagttttgtttcattttcctatgcgcttccatgggccttctacgagcttttccatttagtctataggttccagggacaatgtttgtagggaagtgggtgggacaatgacagtgtgatagactgtgatcatacaggaaatcagtgcaatttttttcttatagaaggtacatgctaccccaagcatcatgaactcatttgatataaatcagacattaagttttaaggtaaaagagttatagtagctgattattaatttcctacatgtttgtattattctaatattttatgtttaaaattacttttaggaattcatgaagcataatagtccacagcagaataagaattgcttgaacaattttgacctttcagaatacagacagattctcagtgatgtggctatacgaatatatcatcaatttattatcataatggaaaagaatatccaaccgataataggtaagaagagaatggatgaccaaaaaatatttatagtaacattaagactttttaaaacataaacttggtatgtgtaatgtgtgattatgtgtaacattgtttaaaaagccaaggaaatataatcatgtagatatctgccttttaattctttgcttgcttataatgattccataaataatagtacgctgttggtagttttctttatataaggatgatttatcctgaaggaaaaaacttggggaaacttctactactgctatttatgtggtacttctacttcttggcgtagccaagtatttttgaaatcctaaagccccattcgaattcttgtatactttccttaatttcctgaaatttaaatactttaggctttaatgcccaggccatgatttgtcatgctaagcagctttctttcctgtgaagctgaaaaacgtgctgcttcaaacctacaagaggagctgcagccccgctggaaacagccgtccatccctaaccctgacacacaccctggtgtcccaaacccttgattcttttgctttctctatcataagtacatccactgactcttgtagaaaaatgtcccatctcctgaaacaaaccgaagagcgtcgggaacgttccgcgtgtgtctcctggcgtgtcagcacagcctccctgtctctccgcagttccgggaatgctggagtatgagagcctgcagggcatttccggcctgaagcccacaggcttccggaagcgctcctctagcatagacgacacggacggctacaccatgacctccgtcctgcaacagctgagctacttttacaccaccatgtgccagaacggcctggaccccgagcttgtgaggcaggcggtgaagcagctcttcttcttgatcggggcggtcacgctgaacagcctcttcctgcgcaaggacatgtgctcctgcagaaaagggatgcagatcaggtaaaacccagaaacctccgctcacgcggagaggcctgcagaaaggatgctcttgaagtccgaggccccacgcgcctgaccctccctgctgtggcgtcaaacccctgtttaggccctactgctgtagggatattcgagtcaccctaggagccccgggatgctggcgcccagggcctactcccctcacgccacaccctgccaactagatggactggcctagccgctttaacccagaaccagtagatgttcatcttaaattctggccctctagggtggtcatgcactcaaccagtagtgactaccttctctgaatagcactgccagggggagaacacaggaaacaaggaaaagtcgatatgatccctgcctttgagaagctcagaatagctaaataataatgaaaggcaactatgattaaatcacaaacaagtggtgcaggaaatgtatcagagaggagagacattgcagacggaacagttggggaagccagagagttgtgccttgagtgataaaggaaacggagaagaacgttccaagcaggagaaacggtcagaggcattgcggggagtgagtgaggacctctgctcaggctgcatgtggagtaagcagaggctggtgtggggagcagcaggaccaaggtaaagagctaggttggatccacactgggagggtctggaataccaggctaaggcatttggagttcatcctgaagacttgggaatctagttttgaggtgtgtctactatctcttaattgagacaccatggaccctgagccactatttgaattaacactgatcaagtgattggaaaacacataatataggatatttacgtttcttatagtgtgtgcagaaatttgatacctgtatctgttatgagaacctggggtagtgatgatggtaatgacgtaagggaaggtgacaaagaaagtatctatcattatgctaagtgaaataagccaggcatagaaagacaaacatcagatgttctcacttatttgtgggagctagaaattaaaacaattgaattcataaagatggagagtagaaggatggttaccagaggctgggaagagtagtggggggctgagtagaggtggaaatggttaatgggtacaaaaaaaagagagaaagaatgaataagacctactatttgatagcacaacagggtgactatagtcaataataacttaattgtgtatttttaaataacttagaggccgggcggggtggctcatgcctgtaatcccagcattttgggaggccgaggtgggtggatcacctgaggtcaggagtttgagaccagcctggccaacatggcaaaaccctgtctttactaaaaatacaaaaattagctgggcgttgtggcacatgcctgtaatcccagctactcgggaggccgaggcaggagaatcgcttgaacccgaggcagaggttgcagtgagccaagatcacaccattgcactccaacctgggcgacagagcaagactctgcctcaaaaaaataaataataaaaaagataaaataacttggagtgtaatggattgtttgtaactcaataaatgcttgaggaaatggataccctattctccttgatgtgcttatttcacattgcatgcctgtatcaaaacatttcatgggccaggcacagtggctcacacctgtaatcccaggactttgggaggtcgaggtgggcggatcatttggggtcaggagtttgagaccagcctgagcaacatggtgaaacctctgtctgtactaaaaatacaaaaaaattagccaggcctggtggtgcacacctgtaatctcagctactcatgaggctgagacaagagaatcactagaactggggaggcagacgttgcagtgagccaagatcgcgcctcagcactccagcctgggggacaaagcaaaactccgtctcaaaaaaaaaacaaaaaaaaatttcatgtaccccataaatatatatacctactatgtacccagaaaaattttttaaaaattgagtatcttaagtcaaaaaatacatgtgagaggcatcccttacacctttttagcattagtgaaactttggagttggagtcaatccccatagaccattcccacaaattctcatgacagcagggcatggttttcagatagaaaggggtattcagaaggactagtctttgcagatctttatgtcttcattgagaaatgagttatgtttatttcacaagctccaagcagatcctgtagtcctctgtagtagatttcagccctaaagtaaagccacatcagagcctttgctaaactcagttctcactccctcagtggatcccccaagactgagtagagacatgaatgaaaaggatcatgagggagacacatgactccaggtcttagaacaacttctttgaggacaggcgaacacctgccccccaggtacccagtactttttcccttccaccaggtggaagtggccatccttttctttttcttttttgagatgggggtctcactctgtcacccaggctggagtacagtggcacgatcttggctcactgcaaccttcgcctcccgggttcaaacaattcttctgccgcagcctcctgagtagctgtggctacaggcatgcgccaccatgcccggctaatttttgtatttttaatagagacggggtttcaccatgttggccaggctggtcttgaactcctacaggcatatgccatttttgtagaaacggagtctcactatgttgctcaggctggaatctatgcttccaaatggggacgtttagatcattttaatgtaatataatatttatatttaggattaccattttattaatttctgcttgttgcttctggttttcatttctccattttctttatctgcttcttttgggttatttgaaattttttagtatccctttctaaattatctattttttttttttttttagtattatccctttgatcttttttctcagttgttgctctagggattccagtacatatacttaacttttcacagtctatttagaatcaatatcttaccacatcaagtggaatgcagaaatcttaccatcatgtaggcccctttagcctccctactttatgttgcagtggtcttatatattagatctacatacatcaaaaactgtaccatacaatattataattttagttttcaaccatcaaacatattttaaagaactcaataagagaagaatagtctattatactcaaccaggtatttaccatttctgttgtttcttcattcctaatgttccaagtctcatttttttccaagtctcattttgatataattttccttctgcctgaagaaagtattttagtattccttttagagcagttttgttggcaataaattattagttttctttcagttgaaaatgtcttcactttacctttattcctaaagggtatgtttgtaggatgtagaattctggattgacagttgttttctttcaccactttaaaaatgttttacttttttctagctactgtggtttcagataagaaatccatagtcatttgaattattccccataaataatgcataatttttcgctgattacttttaagatttttttttctttgtctttagttttccatagtttgtgatgtgtctgggtgtggatttctttggtttagcctgtttggaatttcctgagcttcttgaatctggccattcaccaaatttggtacattttcagccactgttttttcagatattttgtctgcatcatactctttgtcttctctttccagaacttcagtgaaccagctgttaaagactttttgttattgtcccacaggtccataaaattctgctcctttttcttagttcttttcttctgtgctgttcagattggataatctctgttaatcctttcaagttcactgactctcctctgtcatctctattctgctagtaagcccattcagtgagttcttttatttctattattgtatttttcaattctaaaatttccatttggtttttctttatattttctgtttcttttctgagactttatatcttttgattcattacaagagagtttggctttactttttagagcatttttatgataacttctttaaagtcttggtcagataatttgaatatctgtgtcatctcagtgttgacttctattagttgttttgtttaatgtgagttgagatctttctggttcttcatatgccaattttgaattgtatattggatatttttaaatactgtattatgagactctaggtcttcattttttagtttatgtttttattattattattattattatttagttacccaagcttgagtgcagcagcacaatcttggctcactgcaacctctgcctgggttcaagcgattctcgtgcctcagcctcccaagtagctgggattacaagcacccactaccatatctggctaatttttacatttttagtagagacggggtttcaccatgttggccaagctggtctcgaactcctgatctcaagtgatccactcgcctcagcctcccaaagtgctgggattacaggtgtgagccaccatccctggccaagactctaagtctttaaatcatatggagaatgtcaatattttcatcaggcggacaatgcacttgggtcagactgcaagttctgaccaccctctatgctttgtggttctcatgccatttccatgtgtaagggttttgtggtgctctttgggtccgtttcatatgtgtgaaaaatggtggccagcttggaacttgggtaatggtatgtttcatagttcagttcttaaattctgtatatgctgtttagggtcagattcatgcgtgggctcagggataaacccaggagttaataaagaacttaacaaactgcttttcccaactttcccaggctcctccctttctgtggcattcctattactttctgccccctttttggtgcttcagctagaaaactggagctttccttaatttgctctgcagtgtacttactgcagatgtctctatctggggccaaatggtgagggcaaagagagaaccttgaaccacagatcctccaattggaagggaagtttcccttctcttcgagttttaggttccttctggcctccttcgccaccactgctgtcgacatgggattggaacttgagcatgagagaatagagaaaaaggagagggaaaaggtagggcattgagcattaggaggccccttttcagctccttgagctagaatcagagagctcccctggagctctttgttggcattgatgcccacctctgagtttcaacctgtggcgagtagaggccagtgaatagcagaggggaaaagtgatgatctcacttttgacttggaaggacttcaaattctggtcatcttccccaatacacctgctactatttacttttccaagtcctcaaatagctgccgaatgcattccattcaggctttatagctgcattcagtgggacagacaagatggagtgtggttactccatctcactgggaactggaaacccaccacacatctttgagtgggagaattaatgtgctcaaaattcagattttagaaaggactgtggcagtatttgaatagggtgaattagaagggctgagatgggagccccattagaaacctgtaataaaaactaaaagtagggccgggcgtggtggctcacgcctgtaaatcccagcactttgggaggccgaggtgggcggatcacgaggtcaggagatcgagaccatcctggctaacacagtgaaaccctgtctctactaaaaatacaaaaaaattagccaggtttggtggcagtagctgtagtcccagctactcggcaggctgaggcaggagaatggcgtcaaccagggaggcagagcttgcagtgaaccgagatcgtgccactgcactccagcctgggcaacagagcgagactccatctcaaaacaaaaacaaaaacaaaaaactaaaagtaggccaggcgcggtggctcacacctgtaatcccagcactttgggaggctgaggtgggcagatcacaaggtcaggagttcgagaccagcctggccaatatggtgaaaccccatctctactaaaaatacaaaaattagccaggcgtggtggcaggcgcctgtagtcccacctactcgggaggctgaagcaggagaatctcttgaacccaggacatggaggttgcagtgagctgagatcgcaccactactctccagcctgggcaacagagtgagactctgtctcaaacaaacaaaaaaacaaacaaaaagcaacaacaacaacaacaaaaactaagcaaaagtaataagaactcaaactagtgggacaaaagtagcaatgcaaaaatgagggatagtgagaaccaacccaagatatatcatctcacacccactatcctatggaataacattaattcagcatcactgtccaaatgttacagccagaaagaagacccacatggggcattgctaatccttaaggtcacagctgggactgattttctttattttgagaaagtctcactcttgtcgcccaggctgaactacagtggtgcaatctcaggtcactgcaacctccgcctcccgggttcaagtgattctcctgtctcagcctcccgagtagctgggattataggcgtccgccaccatacccagctaatttttttgtatttttagtggagacagggttttgccatgttggccaggctggtcttgaactcctgacctcaagcgatcagcctgcctcggtctcccaaagtgctgggattataggcgtgagccaccatgcctggcccagagctggaactgactttagagatcactttattcaacactcaattttttttagcagtttcattggtatgtaatttatataccatacagtttacctgtttaaagtatatagttcaggccaggcacagtcactcacacctgtaatcccagcgctttgggaggctgaggcaggcagattgcttgaggccaggtgttcaagaccagcctggccaacatggtgaaaccctgtctctactaaaaatacaaaaattagccgggtgtagtggcaggcgcctgtaatcccagctactcaggaggctaaggcaggagaatcgcttgaacctgagaggtggaagttgcagtgagcctcatgagattgggccactgtactcccgcctgggtgatagagggagactccatctcaaaaataaataaatgagtaaataaagtgtatagttcaatcgtttttgatatatttacgtagttgtgcaactatcactgtaatgtaattttagaacattttcatccctccagaacgaaaccttatactcattagcagccagtctcatcccccaccccaactccctaccctgcccagcctaggaaaccattaatatgttttctttctctacagattttgcctattctggacatttaaaaataaatgaaatcataaaatgttatcttttgtggatggcttctttcacttacgtaatgtttgggaggttcatccatgtagcaaatatcagcacctcattcctttttattgctgaataataccccattgcatggataatgccacagtttgttcattcattcatcagttgatggatattttgggttgttttcacttttgggctattatgaataatgctgctgtgaacatttgtgtacagagttttgtttggacatgctttcacttctcttgagtacatgtctaggagtggaattgctgtgtcatatggtaagtctgtattcgattttgagaaaccaccaaactgtcttccacaacagctgtaccattttacgttcccactagcaatgtttgagggttctcaacactctcattgtgcccagagaggtcgattaacttcccaggctcacacagtggattggcaggactaaaacccatgcctcttaactcataaacccatgtggcaattagtgacagaaataagaataaaaactgcagtcgaccgaaagccttcactaattgaaagatttctgccaattcaggaaaaagaaaacagttttttatacttatggaagtcttctcttcagatatcactgtttctttcctttaatcaattttcaaaattgtatttcgtaagtgattgcaatcactgttctttgctcagattttccccaaagtctgtagctgttccggcccctcagcctagaccaccatgagtcttagaactctggattaggagagctgatcatcagtccaactccctcattttgcagatgagtaactgctgagctgtggtcttaaggatctcagcgaactctggtaccctctcgggacacacaggagtatctggcacccttccctaaagtattctctgttcttctgcctttccctccaggtgcaatatcagctacttagaagaatggcttaaagataagaacttgcagaacagcttagcaaaggaaactttggagcccctctctcaggcagcctggttgcttcaggtcaagaagaccacagacagtgatgccaaggagatctacgaacgctgcacctcactgtctgctgtgcaggtgaccaggcttgcttagtgtctccctggctcttccctgacacatcagtgcagtgggcattgcctttcttggtttagccagctgtgggcaccctgattctgtgtgtactctcgggagcatacctatcacccatggcccacccttttatctaataaatatttattaaatactaacactaggtcttaaaaacatagaaatgggctgggcgaggtggctcacagctgtaatccagcactttgagaggccaaggtgggaggattgcctgagcccaggagtttgagactagtctgggcaacataacaagacgctctaccaaaaaaaaaaaaaaaaaaaaaaaaaaaaaaaagctgggtgtgatggcacacacctttggtcccagctacttgggaggctgaggcgggaggatcgcatgagtccaggggttcgaggctgcagtgagccatgatcatgccactgcaccccagcctgggcaataaagggagaccctatctcaaaaataataataataataatcacacacacacatatacacaaatgtctatgatgcattcattccctgcccattaaactcacaaatgtgtatgtggaggggtggccatgtgggaggtggggaggctagaagggggctcctcttactgttttctgattatctgatttgcctttgctccctaaggcacttttctccccttgttttcttttcttggaaataggtaacatacagttcctgaaccaaattataggctaaaagaaccacctgtgcttcccaatggttcccaataaccagaaccattattttatgaacagagttattattttgcatggtctaacaccatgttatgtaccgtttgcagatcataaagatccttaattcatacacacctatagatgactttgagaagagagtgactccatcctttgttcgcaaagtacaggtgagattcttaaggatgtgccttttaattttacttcctaactatggtataagatgttgatacttaattaacattatagaaatccaggattaaagtacatttacccacatatacaaatgaaaggcacccagctcaaaggtaagcaggaaattttcctgtgaaattttcagaatccaccttagtccaggtgggaggggaatgaaagcaccaaaatcatgtctcccgtgctgtattctgtcaatatatcttatttcttactgatcgttgaatactgtgcaagtgggcagaggctgaatggaaacagagaccatttttcttttataatcatttgtataaccattttttcttatataatccctaaagtttgtcccctaaggaactctagggcagcagttctccaagtttggctcaaggatccctgggagtccttgagacactttcaagagggtctgcaaaactcttcctttttctaaatatgtacctgtggattttctaagtaggtatctgtggattttctcaatagttatctgtggattttcttcgtgtacttcaaccaaaataacatatcacaacagattgaatgcagaagcagatatatatgatatatcgtatatatgataatatagcatatatattaaaatatggtgtatataatatatggttatatatgataatatattaagtcagacatgaaagagatttgcaaaaatagaaaataccacttctcactaaattttctttgttttggaaacttatgtttaacatgtgtagagcttattttaatgaattaataaatcattttaattactaatatggcaaataccgatatacacatatacacaatgtatatttaattactaatatggcaaatgccaatatacccatatacacaaaagcttttggggcctcagtcatgttttagtataaagcggtcctgagaccaaaaaggttgcaaacccatgaatgaagaagaaagatgggttcaataaaaatgtaatacttgaaatctactcatgtttgaccttagaattatgccatgagaatagattagaatagaaaacagatttatggtcaactcatcccatgggaaattaacttctgaagtgaaacaggacaagttaattgttctgagagctgatctggaagccctggatagactttggaattgtgctgttgttaaaaagttctcatgtatgtcatttcatgtgatggtgcaaggagctctccactagagatagctgtgttttgccttgactttcaggtagcagtaaagcagaacatgttagtttccttactcatttttcctctgattctaatttcaggctctcctaaatagccgggaggattcatcacagctgatgttggataccaaatatctctttcaagtcacatttccttttaccccctctccacatgctctggaaatgattcagatccccagcagtttcaagctaggctttctgaataggttatagcaggagaaaaagtcaatgcactttttcttcaaaagctaagtgaaggttcaatatgagggatgtgttttattaattggcagtggaaattggaatgtgatttaaggaagaaaacagacttttctcaaatggaccacatcatctctcactcacagtgacaatgctgctcctgtaattttgtaagaattcacacacaccagctgtatttggaaaagccatgtctcactctcgaatctcagctggttttcactgaaattcctggagggctcatattttcttccacgtgcctcttgatctgttctgtcttgtggcagggctctaccaggagggagtgagatctggggacacagtggcttccaagttttctaaggttcatgtgaaacctgagtacatttacaaagctgcaagtggattctagtgctgagtcttccaggaaaaaatcccgtttggccaccgtgacctgccaaaagttctcttgccccatgcctgctggggacagaaggttttcatgaactctttttactgaaaatgccctgcatttaaaaatgtttattttagacccttctaaattttttttttttttttttttgagactccggagtctcgctctatcgccaggctggagtgtagtggcatgatctcggcttattgcaacctccgcttcctgggttcaaacaattctcctgcctcagcctcctgagtagctgggactacaggcacctgccaccacgcccagctaatttttgtatttttagtggagacaggtttcaccatgttggccaggatggcctcgatctcttgacctcgtgatccgcccacctcagcctcccaaagtgctaggattacaggcgtgtgccaccgcgcccggctgacccttttaatttttaagagtgttcaatccgagatgaatcatttgaagtatttttatatgtatatctatttaaaactaatatattattaaagcttaattgccatgccgtttatcttctctgaaagaacttcaaatcttacctgccaacatattcaccataatttttttattttttaatacctttcatacaataacttttttaaaaaaacctcagattgaaaaagcaacctaaattactttcgctctctaatcagcatttcaatgtatttatttttaaattttctcaaaaagtaactaaaaaattgtgtcggaccctacttttgagaaatctacgtttcccaagttttatgggaactggctattccttgtcccggcacaccttctcattccttcctttcagagcctaaaacctcatttgataagcactcctagtctctggcctgtggatccagtgctattctgtcaccaacctaagaatcccaattgcaccttctgtttctgacagtcacaggtgacagctgtgattctataatacagactggtgtcttagaggtaggaataatacatgattatgaagcatcaccctgctaatacataataatgtctttttatattataagtgattgagtttagttcatttcaatacattgtacatgaaaaaatgaaaagtagaactttgtaatactttaatcaataaaattaattaccaaatgaattgggtcagattctttcattgcgaggagatgacatgtctcttaagtgtacaagttgtatgcctttctttacggtcatactgaaagatgctagaatctttatagattcataatatctcatttaaagtatattaaaatgtttagagaagaagtaaatatgtcataagtgctggcttaggctgtgtctccagggcgcttccacactgtcagaatgaggggctacttggcagagaattggcagggtttctgatcctgagctgcggcctccatgccctttctagaccttccccacaccatgaggagccatcactgttggttttcggcttccataactcaggatttatgcctgttttatagcacttaccctggactggaagccagaaatgctgcccatttcctctgtaggcctgtgagccccagagggcaggtgccacatcctcctcatccctgccttcatcctactgctgatgaggtgggaagagaactgaaggagcaaagtcccgttggaggactgtgtgtgtgtggtggggagtcaaccatgggaaaaagtaggtcatgtttggggacagggagacctgtggaggctgaggagtttatgtgtggaaaaatggggaaagggaggcactcatcccacagtcttgatcagttctacaaagctgacagtggcaaggagaccaaaatagagaaatgttaagaacatgtggcccaggtgaatgtgagggctgctcagtgagtgggcgcagacacagaggtcaaacctgccaaggcctccctccacagaggggctgggcaggttccaggggtgagtgagggatgcagatggcagtgcgtgcccagcagggagcatggaagtgctgtggaggaaggaagcaagctgagcagcactccagagaagataaggagattagccagtgggagacgtgcttcacacctcaagctgcgcgctggtcctcacctctcaccatctgctctgtggctcccagtgctgactctggaaggtatgtgcatgctgacattcggttaaaatactccagcttttgaaatgctcagaaaagcatccagatgagtacagggcacagtgttagcaggtctttctgtgcggtgggagcatgggtgaggggttttgttgttgttaatccgtagaatctaatttttctacaatacacatgaatttattttgaaatagtaaatttcaaatatttcaaattgaaatatttcaatattttttacattaatattggcatcaggaaagagattaagcatacttaaaatcactaagtcagttttaaaatttgatccaggtgacacatggcaacataagcctctgagtacagcttatggggttagaaagaggtttttagttgtaagtctgagatacatccacattgtgtgtatcagttattttttattctatgctcatttcacagtttcgtctgtgactggtgaacatttgggtctttcaagtttaggccttctatgaatagctgctatgacatttatgtttttttttttttttttttttaaggaaataagcattattttctgtggtgtatgtatgcacgagtagaattgcctggtcatagactatatccgtttcactttagtagctcctaccaaccagttttctacagtggttataccgacttatactcccactagcagagaaaggcagttccagtctctgcatccttgcccacactttgtgttgtcaggctttttaggttttctgatggctaagtagttgtatcacatcgtagttttactttgtatttctatgatgactaatgataatgagcacctttttatatgtttattgaccatataagtatcctcatttgtgaagtgactacacaagccttttgtccattttaaaaataatctttgggctgggcgcggtggctcatgcctgtaatcccagcactttgggaggctgaggcgggcagatcatgaggtcaggagattgagagcatcctggttaacacggtgaaaccccatctctactaaaaatacaagaaattagccgggtgaggtggcgggcgcctgtattcccagatatttgggaggctgaggcaggagaatggcatgaacctgggaggcggagcttacagtgagccgagattgcgccactgcactccaacctgggcgacagagcaagactctgtctaaaaaaaaaaaaaaaaaaatttattgagatatgatgtccacgttttgtttcatgttttaaaacccatcattttaaaacatatatttcagtgttttttaagtttatttacaaggatttgcaaccattgccactgactccagagtattttcatcaccccgaaaaagaaatcccataccccttaagcagccactcactctcagctccctccttcccccttattctctcttccctccacctcgcaactactcatctgcttcatgtctctatggatttgctgatcctgtacacttcatataaataaatcatacaatatgtggccttttgtgtctggcttctgtcataggatagcgtttttaaggtttgaccatgttgtagcatgtgtcagaacgtcattcttttttattgctgaatagcagtctactggagggatagacattttgtttttcatttgtcggttggtggacacttgggttgctttcacttttggctaataatgctgccatgaaaattagtatgtacatttttatgtgaacatatattttctttttttttgttctgagacggagtctcactgcattgcccaggctggatttcagtggcgcgatcttggctcactgcaacctccatcccccaagttcaagcagttctcatgtctcagcctcccaagtagctgggattacaggcacctgccaccacgcctggctaatttttgtatagtagatatggggtttcaccatgttgcccaggctgacctcaggtgatctacccgcctgggccttccaaagtactgggattacaggcatgagccaccacgcccagccagtgaacatacattttcaagtatcctgggtatatatctagaagtaggattgcggggtcttatggtaacagctgtatatttaagttttgaataactgccaaaccgttttccacagctgcaccattggaaaacggctaccccactttaccttcccaccagcaatgtatgaaggtccttttgtccatttttaattgagttaatgaagcagtattttaaaagtaaaaactggatataccctatgtatccaaacacggaagttggtttaataaattatgacactccacagcatagaataatgctgaacctattaccaaacaaggttgatctataagtgttaacagaataagttagatgaagaaagcaagtagccctatttgcatgactaccaaagctgtatctatgtgtttgtgccagaaaagtctggaagaataaacaacaaactaagggcagtgaaaatgcagggcatgtgatgggggattcaagttttactttttcatctttggtactggttctttttaaaataaacacgtatttctgtggtaattttttaagtcacatatttaggtaaaacagatatcaaagaaagtttgtgcttggcataaagttattaggggaaggtttgagaagttctatgaactactgcagagcaacttcatgtcaaaatttgttaaatggggcatttctgtctttcttgtcaaaatgctcatcgaaacattggctctagctgtgaaaaattctctcatcataaaaaggatattgacaataagtacaacaaagtactaaaatttagctgatacaaatactaagtgaaaaacatcaagatacagaaatgtaatcagtatacatgaacagtatgacctcagtggtctcaaatctattcttgctacaccaaaatgtaaaaagaagtttctctgagtggtgggattataggtgattatcttcttccttatatctttttttcccccaaactttctacaatgcatatgtataatatttacagtttaaaaatgctttaaatttagtttgtagcttgcccatgtttaaccagtgaggtctaaaatgctagctatgtgatacgacttaaggcccataggactcaaaaattggagtctccgttaaaaaatggtgttttccagtaatatgcaatgacgtgaagatgaaaatgctattatataaagtagtatatggcatataattccaatttgttaaaaagtacacacatatatacttataaagatactagaggaaaacataaaatgccaacaggtcagttgttggtgtagggcatgtgggcgatttactttcccctttttgtgtccttctgtttccacttatttatttatttatttttaatttttaattttctttgagatggagtctcactctgtcacccaggctggagtgcagtggcatgatctcagcttactgcaacatctgcttcccggcttcaagtaattctcctgcctcagcctcccgagtagctgggattacaggtgcgcaccacaacgccaggctaatttttgtatttttagtagagatgaggtttccttatgttggccaggctggtctcaaattcctggcctcaagtgatccacccgccttggcctcccaaagtgctgggattacaggcatgagccaccacacctggccctgtttccagttatttataatgaacattatcagcatcttttataatttgaaaaaattcaaaatttagtttgagaagaaaaacattgcctctatctagatatggaatatcggctatcttttcaacttgtctttctctcccgtgcctcccagccatccttctattcctcctccacttggtgccataggttcctctcgccttccattcccatagctgctcctctgtccgcagctcatttcctcttctccagaacatagcaatctcttaacctagtttgttttcctgccgtcccttctctctctctctctgacctacttctggaagcacaaatgctggaataatccacgtggatgacactgctcccttgcttaacagcctgtggctcaccgtcctaatgctattactgggagtgttcagcccaaccttgttactggctgcctttacagggctggggagtgggatgcaacagttaccaagccccaccatgggccaggctctggagggcaggcccttttttgttaactcaccttttgtgacaaaaccatgcagcttgaccatgctagcttggaaatagggttccaaagtgtgtattcatgctacttacagactcagctctgccgctgaccttgaacttgtttaatccccctgcttttcctcagctgtaacacagatgtcctgcctccctcccagggagaggcgagggctgggcactctgtggcagttggtagctggtttccttgcgagctgttgtccctaagggatgccctgtacacctttgttgcccagaggtctcgaactgtgctgactgcccctttgctgtaagagctcagcccaactcatgagcccccattatctctccagccccagggtgggctccacatggcagacgttcctcatcagaaatgtccccaactgtcacctcccccataaatgcatccctctcagatttgactctgttgaaatgttcagaccagcgcccccaattatctttatgttcaggggttcatttctttgaatcttgacggggctcactctagaacacctaccaaattgacagggccacactggctgctcccttcccccttaaccgctttgtcctcatctccagcaatggcaacataacccctcggtctcccaaagaaatctaggccacagcacccacatctccctctcctcaactccacatgccaaatccagctccttctctctttcctaagcatggtccaagtccatcccactacattgctttgtgggcctaaaaggaagaggctgtagcacaaaccaagacttaaggagtttacttgagccaaagtgaggacagattcctggaaggcccagacccaagtaaccttggacattatctctgtttggcctttgttacaagcagtttttttaaaaaggcaaaaaagagggaccgggagtgggctgatacaaagttgttaggaattctcattagtttacagaaataacattgattagcgactggttatacattgttacactacagggtgtgggttatagtgtccagtgtggcattattaggttattttttagctacttgtgccaatggcaagcagtttcaagagatgaggccaggtgtggtggctcatgtctgtaatcccagcacttcgggaggccgaggtgggtggataacttgaggtcaggagtttgagaccagcctggccaacatggtgaaaccctgcctctactaaaaatacaaaaattagcctggcatggtgtcttatgcctgtaatcccaactacttgggaggctgaggcaggaaaatcgcttaaacccaggagaacgaggttgcagtgagccaagattgtgccactgcactccagcctgggagacagagagatactgtcccaaataataataataataataattaataataataataataataataaaaagatgaatacacagctcaaagtggggactagaacgttattgctgtctcattttcatgattctctgggcctgataatttaaaagggcttgcattcctcagataaaagttactttctcacctttagtccatgacttcctcgcgtcttgtctgaaccgttgccataggctcctcttatgctttctttggcatccccagcctcaccctgcccctacccatgtccctccttcccaaggcagccactgttcccgctattgctgccactcagggcagcatgacctcgctggcacactccctgtattaccgaccttgagctaagtgctttacgcactgactcttatcattctcttgacaaccccagaagggtagattttaagatctccacttgacagattagcaaaaccaagcttcagagaggtcagctaactagcctcagtggtgggccgggaccaggcagccagagcctgtccctgtaaccactagatgcttgtgctgcctccctgcagcggcctgggcctgtctgttgacttccttgtgaacaggcagggaccctgggtctttggctgtcaaatgtttaataagtgagtgcttgccttgcacggaacccacaccacacttactcaggcccctggctttggttggggtcaggctccatcatttgctgacccttatctttaaaagttcaccctgaggggaggaatgtttttaaaagttttaagttatagcatccattacaaaaacattttccattgtgaaaccccacagaattgatattgtgctgcaaggatcaatcctgcctgacgcaggtctgccagctgccaaaaaactggttaaacgtgttaagttcagaaaacctattgtctgatgctttctcactgattaaatgagttgtattgacccagcatgttgtaatagttgaaaggttataaattaactgcatatactctatcccacatgtagacgtctgaatagctaccacggtacaagcaagaagagattttagaaagttaaaaccattggcttttctcacaccccctcccttcttttcactttttttcagctttatcttgggtaaaagatgtgtgatcagacctttctcgttaatgtatttggctcatgtgacaaatgtttcaaacaacgagctctgagaccagttttcaagaagtctcaacaactcagctactgttcaacatgtgcagaaattgtaagtgccacttaaaaaaaattcagttatctgtcttaaaacagtcaagcgagggtcctgtgacagatgagatgccatagaatcagcttatataacacacacttttcagtatgcctgggcttggtgaggcagtatagtacagaggttcagggtgtggactctggtgtctgactgcctgggtccaaatcctattgatgttcctagttattggtgtgcaaggaggttctcacctctctcctgaagcctgtttttcccatctgcaaatagtaatgctaatagcacctacatcataagagttttatgatgatcaaatgatttcatttgataacttattttaaatagtacccagcaaggaaagtactcaatgaatgttttagcttctattatttcttagggctaatacttttttcttctgacttctacaagtctgcttggcaggcaatcaagctaaaagagaagctggcaaataaacagtctaggagcatctttccaaggaccggtcccagtggtgtgtaggtccagctctaatgaagatggaatctcacagggcctcagtagtgagcaaaattcagctcagaagtactccttgggcctaagccttcaacaaagactaggaatggaatacaaatcctggaatttttcaaagtacacaaaatcaagtcctcaccagaggtggctgtgcacaggcttcagatcttgcagcaaaaatgcccacagcatcactgaagccctaagaattagtcctatctctgagaatttgcaaagctgcgctcaatagtgcagctgagcagagcccccacttggtgaaaagtggtaaagcactcctcctgaaaagcccagtaggaaatccccacacatttaaaaaaacaacaacaaaatccataatacaaccaaagagaggaaagatgacttttacattttatctaactgaaaaagaaaaggcactttttatcctcctgattccactgtaacccctgaccatgattacattaaaaattattcccttaaagcaaatagcaagtaaacagcccagggtggcataaaaaggctttgatacagcatagcaatttggatatgtcttcagcctaggtgtagtgggcttctacctgtagtatatttctacagtctacgttctaacttggccctgcaaattgtagaactgaggacatttagttcttaaaaataaacctgctttctgggggccttaccccccccccattatttattaatctaactcttctgctttttaaacaacttcctctgcaggtggaataagcccaagaatcccagattttgagtcctctgtggcacacaggttctccctagcacaggggccatgcctggagatacttttctagggaatagttgccagctagcgctactattaggttggggcaaaagtaattgcggtttttgccattgctttcaattgaagcagtggcacgatttcggctcactgcaacctctgactccagggttcaagtgattctcgtgcctcagcctcctgagtagctgaggttacaggcacaaaccactatgcctggctaatttttgtatttttagtagagagagggtttcaccatgttggccaggctggttttgaactcctgacctcaggtgatacactcaccttggcctcccaaagtgttgggattacaggtgtgaaccactgcgcccggcccacacaatcttacttaattctcataacaattctcattgctttcaattgaaagcaatggcaaaaaccacaattactttaatacaatctctactctctacttgggggttcccaaatattcagacagcatcattcagctgaagagacatccagtgactgacagctggcctttcatccaactgtttgggattatgtagacacagtccccattgggccctttttgtgaataggagtgaccctttatctcaaccactgtggaatgtagctgacctcaacttttctgatatccagcttcctcagtgggagttaacaccaaaatacaagaaagtacttggaaaactgcctaaccattaaaagtctgatggcctcatctctagatagttgactctccaggttggaggctgttcgaggtttattttacacaaagaacccccagaagagggcacacaccagtgagaagtaccacgtgcctcaggtcttcacagccaggaggaccttgaaccacacacacatcctgcaacggtccaaacagagccagcctaaggaggtgatgagatgaggctgcc

SEQ ID NO: 2355 - DNA, 6936 bp, Homo sapiens
aaactttgggcaagatggcccggcggtgatttccgcggcggtctctcctgcgcccggcctctgcggcgcaggcccagcccccgaacctcgcacgttcggcagccccggcctggccccggcccctcctgcccatggcggtggccgagctgtacacgcagtacaacagggtctggattcccgatcctgaagaagtttggaagtctgctgaaatagccaaggactacagagttggtgacaaggtcctgcgactcctgctggaggatggaacggagctggattattctgtcaatccagaatctctgcctccacttcggaatcctgacatcctcgtgggcgagaatgacctcacggctctcagctatcttcacgagcccgcggtgctccacaacctcagaatccgctttgcagaatccaaactcatttacacctacagtggaatcattttggtggccatgaatccttacaagcagttgccaatatacggagatgccatcatccacgcctacagcgggcagaacatgggcgatatggacccacacatatttgccgtggcagaagaggcatacaagcagatggccagaaacaacagaaaccagtccataattgtaagtggggagtcaggtgctggaaagacagtgtcggctcgctatgccatgaggtactttgccaccgtcagcaaatcgggcagcaacgctcacgtggaagacaaggtcctggcatccaatcccatcaccgaggccgttggaaatgccaagaccacccgcaatgacaatagtagtcggtttgggaaatacacagaaatcagttttgatgaacaaaatcaaattataggagccaacatgagcacttacctcctggagaaatccagagttgtctttcaatcggaaaatgaacgaaattaccacattttctatcagctttgtgcatctgcacagcagtcggaatttaaacatcttaaattggggagtgccgaagaatttaattatacaagaatgggaggcaatactgtcattgagggtgtgaatgatcgagctgaaatggtagagactcaaaagaccttcacgcttctgggtttcaaggaggattttcagatggacgtttttaaaatcctggcagccatcctacatctgggcaacgtgcagatcaccgcggtgggcaacgagaggtcctcagttagtgaggatgacagtcacctgaaggtgttctgtgagctcctgggcctggagagtggcagagttgctcagtggctgtgcaatcgcaaaatcgtcacaagctctgagacggtggtaaaacccatgaccaggcctcaggctgtcaacgccagggatgcactggccaaaaagatctatgctcacctgttcgacttcattgtggagagaattaaccaagcgttgcagttttcaggcaagcagcacacttttattggtgttttggacatttatggttttgaaacctttgatgtgaacagctttgaacaattttgcatcaattacgctaatgaaaaactgcaacaacagtttaacatgcatgtcttcaaactggaacaagaagaatacatgaaggaagatataccttggacgctgatagatttttatgacaatcaaccagttattgacctgattgaagcaaaaatgggaattctggagttactggatgaagaatgtttgttaccacatggaactgatgaaaactggcttcaaaagctgtataataattttgtcaacaggaaccctttgtttgaaaagcctagaatgtcaaacacatcctttgtcatccagcactttgctgataaggtagagtataaatgtgaaggtttcctggagaaaaacagagacaccgtctatgacatgctggttgaaatcctgagagcaagcaagtttcatctctgtgccaacttttttcaagaaaatccaactcctccttctccttttggttcaatgattacagttaaatctgcaaagcaagtcatcaagccaaacagcaagcatttccggaccacagttgggagcaagttccgcagctctctgtacttgctcatggagaccctcaatgcgacgacgccccactacgttcgatgcatcaagccaaatgatgagaagttaccctttgaatttgactccaaaagaattgttcagcagctgcgagcctgcggcgttttagaaacgattcgcattagtgcacagagctacccttccaggtggacatacatcgagttctacagtcgctacggcattctcatgaccaagcaagagctttccttcagcgataaaaaggaggtgtgcaaggtggttttacacagactcatccaggattctaatcagtaccagtttggtaaaaccaaaattttcttcagagcaggacaagtggcttatttagagaaacttcgattggataaactgaggcagagttgtgttatggtacaaaagcacatgcgtggctggctccagaggaaaaaattcctccgagagagacgagccgccctgataatccagcagtacttccggggtcagcaaactgtgaggaaagctattactgcagtggccttaaaagaagcttgggcagccataatcattcagaagcactgccgcgggtatcttgttcgcagcctgtatcagttgattcgcatggccaccatcacaatgcaggcctacagccgaggattcctggcaaggaggaggtatcgaaagatgctggaggaacataaggctgtgatcctacagaaatacgcacgggcgtggctggccagacgcagattccagagtatccgacgattcgtgcttaatattcagcttacttacagggtccagcgtttgcagaaaaagttggaagatcagaacaaagaaaaccatgggctggtggagaagctgactagcctggctgctcttcgagctggggatgtggaaaagattcagaagctggaagcagaactagaaaaagcagccactcacaggcgaaattacgaggagaaggggaagagatacagggatgctgtggaagagaaattggcaaagcttcagaagcataattcagaactggaaacacagaaagaacaaatacagctgaagcttcaagagaagactgaagagttaaaagaaaaaatggacaacctcaccaagcagctctttgatgatgtacaaaaggaagaacggcaaagaatgcttcttgaaaaaagttttgaactgaaaacacaagactatgagaagcagattcagtctttgaaagaagaaattaaagctctcaaggatgagaagatgcaactccaacacctggtggagggggagcacgtcacttctgatggcttgaaggcggaagtggcccgcctgagcaagcaggtcaagacaatctctgagttcgaaaaagagatagaactacttcaggcacagaagatagatgtggagaaacatgtgcagtcacaaaaacgggaaatgagagaaaagatgtcagagatcaccaaacaacttctcgaaagctatgacattgaagatgtaagaagcaggctctctgtggaagatctggaacatttaaatgaggatggagaactttggtttgcttatgaaggactaaagaaagcaacacgtgttttggagagccatttccagtctcagaaggattgctatgaaaaggagattgaagctttgaacttcaaagtggtgcatctcagtcaagaaatcaaccacctgcagaagttattcagagaagaaaatgacatcaatgaaagcatccgtcatgaagttaccaggctaacatcagagaacatgatgatcccagactttaaacagcaaatttcagaattggagaaacagaagcaagatcttgaaatccgcctgaatgaacaagctgagaaaatgaaaggaaaactagaagaattgtctaatcagttacatcgcagtcaagaggaggaaggaacacaaagaaaggccttggaagcccaaaatgaaatacataccaaagagaaggagaagctgattgataagattcaagaaatgcaggaggccagtgaccacttgaagaaacaatttgaaactgaaagtgaagtcaagtgtaacttccggcaggaagcatcccggctcactttggaaaacagggatcttgaagaagaattagacatgaaagacagagtgattaaaaagctacaagatcaagtcaagacactaagcaagacaattggaaaagccaatgatgtgcactcgtcctcaggacccaaggagtaccttggaatgctgcaatacaagagagaagacgaggccaagctcattcagaacctcattcttgacttgaagccccgtggcgtggtggtgaacatgatccccgggctgccggctcatatcctgttcatgtgtgtgcgctacgcagactctctgaatgatgccaacatgctgaagtccctcatgaacagcaccattaatggcatcaagcaggtggttaaggaacatttagaagactttgaaatgctgtccttttggctttccaacacttgtcattttctcaattgcctgaagcagtacagcggagaagaggaattcatgaagcataatagtccacagcagaataagaattgcttgaacaattttgacctttcagaatacagacagattctcagtgatgtggctatacgaatatatcatcaatttattatcataatggaaaagaatatccaaccgataatagttccgggaatgctggagtatgagagcctgcagggcatttccggcctgaagcccacaggcttccggaagcgctcctctagcatagacgacacggacggctacaccatgacctccgtcctgcaacagctgagctacttttacaccaccatgtgccagaacggcctggaccccgagcttgtgaggcaggcggtgaagcagctcttcttcttgatcggggcggtcacgctgaacagcctcttcctgcgcaaggacatgtgctcctgcagaaaagggatgcagatcaggtgcaatatcagctacttagaagaatggcttaaagataagaacttgcagaacagcttagcaaaggaaactttggagcccctctctcaggcagcctggttgcttcaggtcaagaagaccacagacagtgatgccaaggagatctacgaacgctgcacctcactgtctgctgtgcagatcataaagatccttaattcatacacacctatagatgactttgagaagagagtgactccatcctttgttcgcaaagtacaggctctcctaaatagccgggaggattcatcacagctgatgttggataccaaatatctctttcaagtcacatttccttttaccccctctccacatgctctggaaatgattcagatccccagcagtttcaagctaggctttctgaataggttatagcaggagaaaaagtcaatgcactttttcttcaaaagctaagtgaaggttcaatatgagggatgtgttttattaattggcagtggaaattggaatgtgatttaaggaagaaaacagacttttctcaaatggaccacatcatctctcactcacagtgacaatgctgctcctgtaattttgtaagaattcacacacaccagctgtatttggaaaagccatgtctcactctcgaatctcagctggttttcactgaaattcctggagggctcatattttcttccacgtgcctcttgatctgttctgtcttgtggcagggctctaccaggagggagtgagatctggggacacagtggcttccaagttttctaaggttcatgtgaaacctgagtacatttacaaagctgcaagtggattctagtgctgagtcttccaggaaaaaatcccgtttggccaccgtgacctgccaaaagttctcttgccccatgcctgctggggacagaaggttttcatgaactctttttactgaaaatgccctgcatttaaaaatgtttattttagacccttctaaattttttttttttttttttttgagactccggagtctcgctctatcgccaggctggagtgtagtggcatgatctcggcttattgcaacctccgcttcctgggttcaaacaattctcctgcctcagcctcctgagtagctgggactacaggcacctgccaccacgcccagctaatttttgtatttttagtggagacaggtttcaccatgttggccaggatggcctcgatctcttgacctcgtgatccgcccacctcagcctcccaaagtgctaggattacaggcgtgtgccaccgcgcccggctgacccttttaatttttaagagtgttcaatccgagatgaatcatttgaagtatttttatatgtatatctatttaaaactaatatattattaaagcttaattgccatgccgtttatcttctctgaaagaacttcaaatcttacctgccaacatattcaccataatttttttattttttaatacctttcatacaataacttttttaaaaaaacctcagattgaaaaagcaacctaaattactttcgctctctaatcagcatttcaatgtatttatttttaaattttctcaaaaagtaactaaaaaattgtgtcggaccctacttttgagaaatctacgtttcccaagttttatgggaactggctattccttgtcccggcacaccttctcattccttcctttcagagcctaaaacctcatttgataagcactcctagtctctggcctgtggatccagtgctattctgtcaccaacctaagaatcccaattgcaccttctgtttctgacagtcacaggtgacagctgtgattctataatacagactggtgtcttagaggtaggaataatacatgattatgaagcatcaccctgctaatacataataatgtctttttatattataagtgattgagtttagttcatttcaatacattgtacatgaaaaaatgaaaagtagaactttgtaatactttaatcaataaaattaattacc

SEQ ID NO: 2356 - protein, 1726 aa, Homo sapiens
MAVAELYTQYNRVWIPDPEEVWKSAEIAKDYRVGDKVLRLLLEDGTELDYSVNPESLPPLRNPDILVGENDLTALSYLHEPAVLHNLRIRFAESKLIYTYSGIILVAMNPYKQLPIYGDAIIHAYSGQNMGDMDPHIFAVAEEAYKQMARNNRNQSIIVSGESGAGKTVSARYAMRYFATVSKSGSNAHVEDKVLNPITEAVGNAKTTRNDNSSRFGKYTEISFDEQNQIIGANMSTYLLEKSRVVFQSENERNYHIFYQLCASAQQSEFKHLKLGSAEEFNYTRMGGNTVIEGVNDRAEMVETQKTFTLLGFKEDFQMDVFKILAAILHLGNVQITAVGNERSSVSEDDSHLKVFCELLGLESGRVAQWLCNRKIVTSSETVVKPMWQAVNARDAKKIYAHLFDFIVERINQALQFSGKQHTFIGVLDIYGFETFDVNSFEQFCINYANEKLQQQFNMHVFKLEQEEYMKEDIPWTLIDFYDNQPVIDLIEAKMGILLDEECLLPHGTDENWLQKLYNNFVNRNPLFEKPRMSNTSFVIQHFADKVEYKCEGFLEKNRDTVYDMLVEILRASKFHLCANFFQENPTPPSPFGSMITVKSAKQVIKPNSKHFRTTVGSKFRSSLYLLMLNATTPHYVRCIKPNDEKLPFEFDSKRIVQQLRACGVLETIRISAQSYPSRWTYIEFYSRYGILMTKQELSFSDKKEVCKVVLHRLIQDSNQYQFGKTKIFFRAGQVAYLEKLRLDKLRQSCVMVQKHMRGWLQRKKFLRERRAALIIQQYFRGQQTVRKAITAVKEAWAAIIIQKHCRGYLVRSLYQLIRMATITMQAYSRGFLARRRYRKMLEEHKAVILQKYARAWLARRRFQSIRRFVLNIQLYVQRLQKKLEDQNKENHGLVEKLTSLAALRAGDVEKIQKLEAELEKAATRNYEEKGKRYRDAVEEKLAKLQKHNSELETQKEQIQLKLQEKTEELKEKMDNLTKQLFDDVQKEERQRMLLEKSFELKTQDYEKQIQSLKEEIKALKDEKMQLQHLVEGEHVTSDGLKAEVARLSKQVKTISEFEKEIELLQAQKIDVEKHVQSQKREMREKMSEITKQLLESYDIEDVRSRLSVEDLEHLNEDGELWFAYEGLKKATRVLESHFQSQKDCYEKEIEALNFKVVHLSQEINHLQKLFREENDINESIRHEVTRLTSENMMIPDFKQQISELEKQKQDLEIRLNEQAEKMKGKLEELSNQLHRSQEEEGTQRKALEAQNEIHTKEKEKLIDKIQEMQEASDHLKKQFETESEVKCNFRQEASRLTLENRDLEEELDMKDRVIKKLQDQVKTLSKTIGKANDVHSSSGPKEYLGMLQYKREDEAKLIQNLILDLKPRGVVVNMIPGLPAHILFMCVRYADSLNDANMLKSLMNSTINGIKQVVKEHLEDFEMLSFWLSNTCHFLNCLKQYSGEEEFMKHNSPQQNKNCLNNFDLSEYRQILSDVAIRIYHQFIIIMEKNIQPIIVPGMLEYESLQGISGLKPTGFRKRSSSIDDTDGYTMTSVLQQLSYFYTTMCQNGLDPELVRQAVKQLFFLIGAVTLNSLFLRKDMCSCRKGMQIRCNISYLEEWLKDKNLQNSLAKETLEPLSQAAWLLQVKKTTDSDAKEIYERCTSLSAVQIIKILNSYTPIDDFEKRVTPSFVRKVQALLNSREDSSQLMLDTKYLFQVTFPFTPSPHALEMIQIPSSFKLGFLNRL

SEQ ID NO: 2357 - DNA, 120495 bp, Mus musculus
  misc_feature (1)...(120495): n = A, C, G or T/U
gcggccgtgtcgctgagggcggacggcgtcgggcgcgctgggctgtgcggccgtcgctgcctggcacgcggggcgcgccttgacccttcctgcactgcaggcttccgacgcgcgcgaagaccgcggctgcgcggccgggagcttgctccgagcggacctggctctgcctgaggagcggcggctcgcgaagaagcgtctccccgggagtgggccgagggctgtgtggaccggcggcggcccctctgcaccaagctgcggtaaggtcccggaaagggcgcgggcctgcgcgccaggggcctttggaccgggcgtggccccccgccggccggctctcccctgccctgtcccgggagtctcagcttgtcctcaggatttctctgcagcggggccaagcaaccctggaatacctgatgaggctccggagcccgcgggctcgccatcacccgggatcaggaagggcaagggctgacttgggcttctcactcagatcttctgactttccctcctcccttcgtgatccaccatcctccagtctgtttctgcggggtgcttttgcagagttccaaagctctccctacctggaagacccccaggttcccccaagagaacttttcctttcaagtagaggttactttctcggcccaagttctgggaggaattctgcacaaggccctggttgctgtgcacagagcagcgggaaagtgactgtgggctccgccgagaggtggcacagtgaagtgcgtggacactcactcgcccgtgttccggtgctttgtgtgggctcagtttgttcatctgtgagccacatctgcctatgcgaggacggggagggtgttgggagagagaaaagggctaatctccggaatgcacttgaaacaaagctcacttctactaaatgcataacgtaaccctggatgctggaggagactctggaccccatgttgtttcaccttttcggctgaaatcgttaccaggcttgtagcctggcctagcaaaatgtttactttgcattctttttccatagcattcgttgaaagtacctttgagcctttggcgacttctgtctttcctcctttcatctcaaggggctccaaccccttatcctgcctcctctaggccagcagttctcaaccttcctaatgctgtgacctgaccccaaccataaaagcattttgttgctacttcataactgtaattttgctactgttatgaattgcaatgtaaatatttaggttttccgatggtcttaggcaagaacgactccctttagaaaggggtcatgacccacaggttagaaaacacccctctacagagccagctgctgtgtttcatttgacttagaatttttctgggtcatttgttttctgttctcctaatggtttgaagtcatcgtaactaggcagtatggtttaagtcattagcctcttttccactgtggcagaattcaaagttgagtataaaatgtttgttttgcatcttgcctcttccagtcactgattatcttacgatttactaaggctttaccactatcccattgctggaattcatgtaagtgtccattctcaaattgcatcaggagataaaggcgccggccagaccccaggttctgtcacgcttgtgtactggctctgggcagagttagttttagaacatcttgtgccttggaactagtttagtgttatggcagatatggtgtcagtagccagtgctggcatgtggttgcagagtcaggaatgcagcacttaacatttgttaagaaagtcccgagacttagtaaacccttctgttgccttaattccaggcatagtaaagtagttttagttattcatattactattttgtggccgtaattcccttccctcgccccttgcgaatatgtagtccttgccgtgtgcaggttttacccttgcagccaaaattcttaactgacctccagtacggtttgagggctggggcatcaatagcgcagtggtagggtaattacctaaacctagattgacgcccagccccggaaatataaaacagcagtaacaagacctcactttgaaataggctgtgcactcctttcttcatcttttaggtttactttggtatgtgtcatgatggccctcagaagaaactagattgggggttgtaagggttttaaagatgattaactataaattggggctggcgagatggttcggtgggtaaaggtgcttgtctccaagtctgctgaccttatctctgtctgtctcagggatccacagtgtggatggacagagctcatcctgaacgttatcctctgactgttccacacctgtgccctcctccaaacaaacaaccccctacacctccccccaaaactaaatgtacttgctttttaatacctttctatcttaacctgtgataacaggactttaaggatttctgaaggctaatgaacccttagaaatggtttgcaagataacttttatttttatacttttaaaagatttgtttgtttgtttatttatttatttatttatttttatgtatattagaacactatagctgtacagatggttgtgagccttcatgtagttgttgggaattgaatttttggacctctgctcactctggtcaaccctgctcactctggtcggccccacttgttcagtccttgctcactctggcccaaagatttatttattactatagataagtacactgtagctgtcttcagatacactagagagggtggcagatctcattatgagtggttttgagccaccatgtaatgctaggatttgaactcaggaccttcggaagagcagtcagtgttcttacctgctgagccatctctccagccccctatttttacattttttttttgagttcactgtcatagtttctaagacaaaactatttgaacaactaacttgaataactaactttttgtgtctgttttgagacaggttcttgccatatattgcatttaaacttactatgtagcccaggttatcctcaaatttgcagcaattctaatgctttagccctatgcttaccccccagttgctagggttgcaggcatacatcaccacatgaaagatttttattttatgttatttcttttttttaaagatatatttatttattttacgtatatgcgtatactgcatctgtcttcagacacaccagaagagggcatcagatctcattgcagatggttgtgagccaccatgtggttgctgggaattgaactcaggacctctggaagagcagtcagtgttcttaaccgctgagccgtctctccaacccaagttatttctttttactgaactggaaattgtatctcacagtatgctcatttcagataattcaagatgtttacaatccattgtttctcctcttccttttcctttctcttctgtgggttttgctggatagctcaggctggccttttacccagtaggtagctcaggctacccttgagcttacagaaatcttgcttggattgcatgtgtgcactcgacacctggcaggtctcttcttctttagacaaaataatatcccggatcctccaagcagggtctcattatatagctctggctgtcctggaactcactatgtagaccaggctggcctcaaactcacggagctctgcctgctctgcctaccgagtgctagaatttaaggcatgcgctacagtacatggctgacaaaatatttttcatcattaaacttttctaaaggatttttttttctgtcattgttttcttctgaacctcttcacaggaccaatgacttcgttttgggttttactgttctctctgtttagtgtgaatgtgcgtgagcagatgccatcatctgtgagcgtgtgcacatatggagcctagggggcagccccttgctcagggctctccactctggctacttgaagtagcctcttacagaaccatgagctcactggtgggctgcagcggctggcttgccaggcatgcacctccttctctctcccctgttctctttctccaggcttacagatgtgagcctctagtcccagctttccatttaaaatagtagaattgcttttttggcagtcacatcctgctaattcataatcataaattaaactcttgttcgtttggtacagggcctcatactgtagcagaggctgacctaggacttactgtgtggctgatctaaacttgtgctagtcctcttgccctagccttatgagttctgacattacaggtttaagtgcctgaggcagaagttaaaatttttatttcttattaattaagaagataaatcctggatatggttttttttttgttttttgtttttttttttttttttaaatcctgggtgtacaacaaacctcagtttctttgtctgaaaaatgggattaatgttagttatctcataggattttaagttctattttaaggaatagaagagggcttttaaaagacagctgtaaacactcaagtatgggccagcacttctcaatagagaaccaactaaatagggtcttgctattttctttaaactcaacttttttttttttttttttttttttggctgaaattccatgcacagtccgccatggctggtcctgccagttctctttttaaacttaatgacgtttctttataagtgtatccatgtgtgaatgtacctgtgtgtgggcacctacagtgatcagaagagggcatcagatcttcagcactgtagttacaggcagttgtgagcctacagggcacagggaactgaactgtgtctagtcctctgcaaaaacagaagccactgctgaaagatggagagaagccatctcttcctctcaggaatttatacttagatgtatattgttaagcaggcttaaaaaaatttaaatgtatacattgtgtgcatacatatgtacatatatatgtacatatatacatgtgtacatacatatcccccagaaagagtttctctgtgtagctttgtcaaggccaggctggcctcaaaatcacagagctccgcctgcctctgcctcctgaatgttggggtcaaaggcgtgtgccaccccccacccccatcatatacattaatttttaaggcttacttgaatttttgaaaattatgtgtatgtgagtgtgtctttgtttgtgtgtctccgtttgcgtgcagctgtcagagaaagccagaggcgtcagacctctgaagctggaagtacaggccgttgtgagcagccctttggggattgaacttgggtcctctgcaagactagtaaatcattgaacgatttctcaatcccaagcagatttctttgtaacaaagatatttaagcttcatttttctcttgctacattataggtttgacttattagaaattaagttggtgaaagccaaaaataaagaggaatattatgaaatgacataaagcctaaaaactgtgggagaagcgctgacaggatagttcaggcaaaggcttttgccacgtgagcctgatggtaggcgttcaacccccagatcccacgtgaaagtaaaagaagaacttactctacatgggtgctgcagcatgcgtgcaccccccaagacagcttgtataaacgtcaaagctattgaaagaaaagaaaaattaagtatatttcagagggacaataaaaatacaatagcaatcataatggccatttctgttactagtgataatacttcataaaaatgctgtggctaatgttgctgttatccacagggatatcggtatgtgtggtaagttaaatatgtaaccatgaaaatggtttgttttaaaaactagaggttatatatgtttctattgtaaaaacagaaattttttttctctttccactttattctaggtttctgttaaaataagcattctgacaaactgctgaagagagagccctgatagactaggtatgtatgtgtatgtgttttatatctatatctacatatttatgtaaatacacatacatgcatataagcatatgcatatacaataaaaccactgtacagagaagaatttgaaacttgttttcccatcatccaggacattgaagtatgagtcatgtcagcccgggccacataggaattttgaggttaaaagttagactgggtgacatggtaagaccttatttttaaatacaaatatacatacatacatacatacatacatacttacatacttacatacaaagaatgaatattgttcttgggtgaagaccttttctgagtgtttcggtctgtgtgtgttcatgtggacgtgcccatgcaggcacggcacatgaatgtagaagccagaggtgagtgtcgtgtcttcctcagtcatttttcagtttgttttttgagtcagtctctcactgaaccgggagctcactgacttgacttactgttcaccaagccccgaggctgccttcctggtgctgggagtgtgtgcgcctggcccttccctgtgggtctgaggatctgaatgcagacccccatgtttacatggtaagcactttactggctgagctgtctcacagctttcagtttttatttctattacagaaggacagaggaatttttggtgtgaatctagtcagtagattcttacagcagtaggtatacatagtaatggtnnnnnnnnnnnnnnnnnnnnnnnnnnnnnnnnnnnnnnnnnnnnnnnnnnnnnnnnnnnnnnnnnnnnnnnnnnnnnnnnnnnnnnnnnnnnnnnnnnnnnnnnnnnnnnnnnnnnnnnnnnnnnnnnnnnnnnnnnnnnnnnnnnnnnnnnnnnnnnnnnnnnnnnnnnnnnnnnnnnnnnnnnnnnnnnnnnnnnnnnnnnnnnnnnnnnnnnnnnnnnnnnnnnnnnnnnnnnnnnnnnnnnnnnnnnnnnnnnnnnnnnnnnnnnnnnnnnnnnnnnnnnnnnnnnnnnncccctcccctcccctcccctccctctttctttttttctgagacagggtctcattatatagcctcagctggcctggaacttcctatgtagaacaggctgcctcgaactcacggagatctgcccacctcatcctcctgagtgctaggattgtagagtaaatcaccgtgctcagttctagtttgtacgttgcaatacctactgtctcagttactttctctcttttttttattgttgtgatgaaatacctgacaaaagcaatttaaggaagaaaaggtttgttttatgtttaagaagatttattttattctttcttctgtctattatgtgcttgtgtttctgccatgtgattgtggatacctgcagaggccagaaaggaatgtcagctctcctggagctggagttatggaagttatgagccacttgatgtgggtgctaggtgcttactggaagactagcaatcctcttaaccactgagacattcttgcagctcagggagggtttattctggcttactatttgatcagcagtctgttatggaggaaaagtcactgcagcaataacttgaagcagctggccatgtcacagctgccgtcaggaagtagagagctcgctttctaccttttacgcagcctggaccccatcccagtgatggtgctgctcacagttaggatgggccttcctaccccagttaccttatccagagaggtcttcagagacctagccagtgccttgtttctttggtattctaggtcctgtcagttcagcacagtcttcacagatggtgaatcttactggcgttggacagctctccagttaggcactcagtcttgtctactcttattctcagctcttgattatcttgtgtacatttctgtagttctttaaaaacacaggagatctggtgtccaaaatgaggagagtagtaagccaagtttactctcaggactctgctgggcctagtggccttgattcacctttttgacttgttatgttagtattggattaccttaaattgaatgaattttaaatcttcctaatatctttgctcctagaggtaaaaccatcttaaaaatacttgaagtggaggctggagaagcacttcggtggctaagagcacttgctgcttttgtagagggcctgggcctgggttcagttctcagtaccagcatggtcgctcacaactgcctgcaactctggtcccaggggacttgacatcctcttctagcctccaaagcaaaaggcaaccacatggtgtacatacgtacatataaatgtacatacatctatgctggcaaacactcgaacgcgtaaataactccttttttttttaagatttatttattttatgtatgtgaatacaggcatcggattccattacagatggctgtgagctacccatgtggtttctgggaattgaactcaggacctctggaggagcagtcagtgctcttaacccctgaaccatctttctagcccagtaaataactcttaaaaagtggttaagagcacgtgtgctctttcagaagaccagggttcaagtctcagcatcaatacagtggctaacaactttagttaggggattggatgccctcttctggctccacttttattctacacacacaggcaaaactcgagtatacttaaaaataagtaaattattttaaattaaaatactttgaggctaaagagatggctcagtggttaagagcactgactgctctttcagaggtcctgagttcaattcccagcaaccacatggtggctcacaatcatctgtaatgggatccaatgtcctcttctggtgtgtttgaagacagctacagtgtacttatatacaaaaaataaatacattcttttttaaaaattaaactaattgggggaaatatgatatattttaaaaattctacatttaataattacaccagttgatgaattttcactaactgtaactacctgtccagaccagaagcagtaattaccagcacccttgtagcacctctgtctcgtcctgagccctttcttctcagggagactatattgacttagggactggttagatctgtatccttcccgctttttaaatgtctttgttggtagtaaccctgatccctctcttcctccctttcttctctccttctcccttcttttccctctttctttcccctctctctccctccttcccacttctacggtactaggaatagcagagctttgcacatgctagaatatgctatatctttatgtatatataaggattcatcattttatttttatttctatgtgtgtgtgtgctgtgtgctgtgtgtgtgcagttaccctcaagaagccagaagagggtgttggatctcttggaattgaagttacaggcagttccaggatacttgatataagtcctaggaatcaaatgtgggtcctttggaagaacaggaagctctcaacccctgagccatctctccagccccaataatttctgttggagacaagatttcaagctggccttgaattgactgtagagctgaggaggaccttgaacttctgttccttcttccgtcccctcctgagtactgggattatagactagagccactgtccctgctttgtgtttgtgttctgctggagatggcagttatagctttattcatcctaggcaagtattccactaactgagccctagccaagccctaatgtttcactttgaactaattttaggtcatagaaagtagaaaagaaagttatgaaggtaatgtaaaatatttgtgttggtcattattccacttccactagtgttaacacatttttttgtatatgttgtgcatgtgtgttttcatgtgtatgtatgcagcaagccccaggcatccacctgttgcgtcaccccctctccctgccagtgctacagttacagacgtgtgtttctgtacgtgggtgctagggatcctaagtcagatcttcatgctttgtgatgactagaatctcaccagcctcaatagtaacagctttacataactgttgtagagtcatgagctacataatgtttcagttagcagctgactacatacatgacagtggttctataaggatattatggtgattaaaaaattcctatcacttagtgatgtagtccattgtaggttagcactttattcatatattggtagagatgctagtcagaatataatgcatatagctgtgtataatacataatagcttgatagtgacaatgaatcatgataccggtctgtttgatgcattatgcgttttcatcttcattttagagtatctttattctacttattgagaaaacatatactgtaaaactatactataacgccttgttatgctgtccccagcctcagattttgtgttgatcatgaatgttaattgcttcacgtgtgcacattcatacacttgcaaatagtgtgtagtttgaaccatctaggtttgattagctctgtgatgatgtttcaaacagagacctaacaatacagttctcagaatactctttgtttaactatatatgactttgtaactaccaagagtgtaatggttaattttttttatttaaaaaattttaattttaaaaaattttgtggagctggtgagatggctcagcggttaagagtgctgactgctcaggttaaggtcctgagttcaaatcccagcaaccacatggtggctcacaaccatccgtaatgaaatctgatgccatcttctgaagtgtctgaagacagctacagtgtacttacatataataaataaataaataaataaataaataaataaataaataaataaatatattttttaaaaaattgtgttttagtgtctggtgcaggtgccagtggaggccagaaggtaaactggagttataggcagttgtgaatggctgatgtgggtgttgggaattgaactgaggtcttctggaagagcagctctcaatcactgagctgtctcttgagtttgtgatggttaattgtgatcaccaactccttcagattaagaagtgcctagggggagctggagtaatggctcagaggttgagtgttcatgttttactagaggaccagagttaagtccccagcaccctcaccaggcagttctcaagagcctgtaactccagaagctccaagggctccagtaccccacctctgttctctgtgggcacctgcacatgaagacacacacactgaaccagagctgttcaacagactgcagcaggaggcacaagagagtgccaggagtagctctcttcccctcttgctttatctctaaaactagtaaccgcccacagaactggtgaatgtttacatagccttgtctctttttacttttgtggtcccctctcttgaattagctttgaatttttagtattttctgttctggaagcacatattgtagaagggcggcgcctgcaatctaggctggccttgagcttaataaatagttgaggatggccttgtcctgctctgtcttctgggttctggaattgcctgtgtttgtcaccgtacctgctattggaagggttgaatgaatgtctgttgaaagtcaacttttttttttttttttttgacagacttcaatgtcattcaggcactttatagctgagaatagccttgaactcttgatcctactgcccatattccaaattctgggatcacagctgtacgccaccacacttgacgttgaaactcaacttttgaaaatgtctttatttccctaagttaaaaaatagacttaaaaaaaaatttctgtatacggatatgtgtttgtatgccctgtgtgtaaaagtgtctgaggagggcagaaatgggcatcagatctcctggagctggagttacaggctattgtgagctataatgtgggtgctaggaatcaaacccaggtcctctgcaagagcagcaagtgatcttaatactgagcatctctcgagttccccactggcattttgaaaaccaatttgctattatggtttgatacaaatcctcctgagtaccttgagggagttactttgtttctcctgttgttgagagatcttgtgtagtgtgtcattcctttgtagataatctgtttttctctctgcctgctttttggtccaaggttcaccccctgcccaatcccagggaccaaacccagggcttttcccatgctattctaggcagtcactttgctgttaagatatgaacctagtcctccactttttaaaaaataaactacatgtaacattaatttactatcttaaccgtttttaagaacacagttgaaccagctggtggtggcacatgcctttaatcccagcacttgggaggcagaggcagacagatttctgagttggagggcagcctggtctacagagtgagttccaggacagccagggctacacagagaaaccccgtctcaaaacaaacaaacaaacaaacaaacaaacccccagtttgtgttttccagtttgttcattctgttgtaaagtcaccaaccacagaccttctctagtaggtcttttatctcccagcactgaagctctgtatcagttaaataatagctccccattttattttccccaaggcctaacagtaccattttattttatgaagtcagcttctctagttacctcattaagtcataaaatgcctgggtgttttcacttgtgttaatgtccttaggcttcattaatgttacagcatatgtgagaatttcactctttttaaagctctttttaatgtattacgtttatatgttccattgtgattataaattcatctttcagtagatacttagttttttttttctacatcttaactattgtgattaatgctactttggacatgagtgttcaaatacatgttgaagcaggacatggatacatatatgttcatgtatgcacaagctttgatcattcttttgggtgtgagttggtatctcattgtggttttagtttgtattttctttttcttttcttttctttttttttttttagaattaatttttttattaggtattttcctcatttacatttccaatgctatccaaaaagtccccaatacactcccccccccacccactcccactttttggccctggcgttcccctgtactggggcatataaagtttgcaagtccaatgggcctctctttccagtgatggccgactaggccatcttttgatacatatgcagctagagtcaagagctctggggtactggttagttcatagtgttgttccacctatagggttgcagatccctttagctccttgggtactttctctagctcctccattgggggccctgtgatccatccaatagctgactgtgagcatccacttctgtgtttgctaggccctggcattgtctcacaagagacagctatatctgggtcctttcagcaaaatcttgctagtgtatgcaatggtgtcagcatttggaagctgattatgggatggatccctggatatggcagtctttagatggtccatcctttcgtcacagctccaaactttatctctgtaactctttccatgggtgttttgttcccaattctaagaaggggcacagtgtccacactttggtcttcgttcttcttgagtttcatgcatttaacaaattgtatcttatatcttgggtatcctaagtttctgggctaatatccacttatcagtgagtacatattgtgtgagttcctttgtgattgtgttacctcactcaggatgatgccctccaggtctatccatttgcctaggaatttcataaattcattccttttaatagctgagtagtactccattgtgtaagtgtaccacattttatgtatgcattcctctgttgaggggcatctgggttctttccagcttctggctattataaataaggctgctatgatgaacatagtggagcatgtgtccttcttaccggttggaacatcttctggatatatgcctaggagaggtattgctggatcctctggtagtattatgtccaattttctgaggaaccgccaaactgatttccagagtggttgtacaagcttacaatcccaccaacaatgaaggagtgttcctctttctccacatcctcgccagcatctgctgtcacctgaattttttatcttagccattctgactggtgtgaggtggaatctcagggttgttttgatttgcatttccctgatgattaaggatgttgaacattttttcaggtgcttctctgccattcggtattcctcaggtgagaattctttgttcagttctgagccccattttttaatggggttatttgatttttctggggtccacctttttgagttctttatatatattggatattagtcccctatctgatttaggataggtaaagatcctttcccaatctgttggtggtctttttgtcttattgacggtgtcttttgccttgcagaagctttgcaactttatgaggtcccatttattgattctcggatcttacagcaaaagccattgctgttttattcaggaatttttcccctgtacccatatcttcgaggcttttccctactttctcctctataagtttcagtgtctctggttttatgtggagttccttaatccacttagattttaccttagtacaaggagtagtttgtattttcttaatgattagtggtagtgagcattttttttcatgttcttattgggcctttatatatattgtatatttttttgtctgagtcctttgtgtttaccgtcctcccattaggtggatttggctgtgttgcccaggctggatcctgacttagaggctcaagtggtctcagcttcctatcagtagctgagaccacaggtattcttgcccattttaaaattgggctttcttattggagtatagttttaagaatcttttatatattctgaagagtaatcctttgtcgtgtgtgtgtgtgtgtgtgtgtgtgtgtgtgtgtgtgtgttcatgcctgtatgtgtgtatgtacatgcttgtggaggctggaagttgacattcgatgtctttttcacttttgtttaaccttagtttttgagacgaggtctctcacttaccctggaacaaccgtttgtctaggctggctgggcagcaagcatcagggacccagtggtctctgttcatcacactgtgccgctcactcacttcaggtaaaggactgacccagcgcttgctggcccctgtcagcatggtttgtgttctgttttgtttaaacatattcttttttaaaaaatatttatttttttaatgtatgtgagtacactgtagctgtgttcagacaccccagaagagggcatcagatctcattacagatggtagtgagccaccatgtggttgctgggatttgaacttaggacctttggaagagaagtcagtgctcttaaccactgagccatctctccagccccagcatgtttttgttgaacagaaattaataagtttttattgaatatagtttatccttttgtttgcctgggttttttgtttgagtgtttggttggttggttgttttgtttttgttttttaagtatttcttatgtagcccatactggccttgaactcagttcttctgtcttagccttctgagtactgaaactatacaagtgtgccaccatacctagctcagtttatcaacctttgtccctactgccatatgtacacgttttgcttattactttggtgtttcctgttttgttagtttctttatttcatgctatattatagtttttcctccatgggttaaaaacctttggtcatttgttgagactagagagtgaggcagtgggaacctggaagaactctgttcatgaaaagcagttagacccaaggcttagcacagcgtagtccagtcattgtaggtcttttccttgtgtgttcagttcttggaagaggaccaccctactcttttgtttatttgccactgttctagaagctaatgaaaggtgcagtgttgagtgtgagttttttctactctgtgatgtgataggaaatcgccttgtgtttattggtttctacatttctatccagtttaatgacttttcctttgttttgccttctgagatggtcttaggcaaaccaggctggttacaggtcctaactcttctgccactacatcccaggtgctagaattacaggactgtgccttcatacctggctatttctttaatgatctcttgtttcatgtctttttgttttagaactattttgtctgttttcattcttagtttctatatatctgatttagaattttttttctcaaattctgtgttttcttggtgtttgtttagagatagtgtctcacactgtagttcaggctggcctggaacccccaacaatcctcttctttcagccttctgagtgctgggatcatagggcactttctccccccactcccatggcgtatgttgatcatatttatctcctcttcccgtaatccttcagattcacctctatgtccctacccattcaacttttgtctttttaaaacgcatgagctccagttcctgctgctccagaagtggcatgtggggcttgcactggagtgtcagcctacctggggtcatgctcttaaagaaaaccaactccttccccaagaagctatccattgtcagtgtctgcccctaaggggactttgtgcccacctgtccctctccttgctaggattttgcctggctagaacttgggcagatcttggcattctgtgagaaccactgtgaactcctatgtgcgctgccctgttgtgtctggaaaacactgctcccttacagctctcaccctccagctcttacagtccttttgtcattccctcttcctctgtgatccattagccttgcagagaagggtgtgttgtgtaacagttccttggagagaaagcctctatcttggagggaagctaattaggaaagtaaaatattccatcttgtagggaagtgcattaagctcagaaagtaaacaacccaaaggtttcatggaaccactgacactgaccagattcagcgagctcttcctccccaagcttatataagcagtcaggactgctgggagatactctcagaacagctgagttgcttagaagactctcagagcagccagactcctcaaagtgatagtctccaacctgccaagctacttgcaagttgcacagtgaactccaggtttccggctttcatgagctgtggtgagctcttggtgatgtagctgtctttggagtcatttctgttcctttaattaaccccaataaaactcactggttctgccaggcagtggtggtgcatgcctttaatcccagcaattgggaggcagaggcagaggcaaatggatttctgagttcaaggccagcctggtctacagagtgagttccaggacaaccatggccattcagagaaaccttgtctcgaaaaaccaaaaccaaaccaaaccaaactaaaacaaaaaccaaaaaactcactggttcaccaggttgaactttggtagtatcctcactttgttttgttgatagttccttatctggggcaagtggatctttgttcacatcactccaagaattgtgtcacataacagattatatagatgtcccatttagagctgaaccactccttattctcttactttctgtttgttgactagatgtgggtctctatgcgttgaccagattagggtctctatgtattgacagatgtgggtctctatgtattgacagatgagggtctctatgtattgaccagatgtgagcctctgctattatctattatctgttgagaggaacagcttccctaatgagggttgagagattcactaatctatatgtatagcaataagtcattaggagtcatttaaatactgtgtccattcagcagaataataagagtagattttcccccaggacctatctagccacagatttttggccctataatggtgtcaaatatgggttctgtcttgtaggccttaaatccagtcatattgatacctgtattgcaccagtgggcgtgtctttccagggctagtttcctgggttcgtggctggagtaaggctgatgattctgttttgttttgcttttgctttggtagcacacatagcaccttccagcattgtgaaagttagcccataggtggggcttccaaggtaggaccagcttcatttctgtatgttttgtgactcaagtagtcagtgtcttcagaaacaggatttttaccaggaagttttgtagggtaactaagagaaagcaatgaaaaataaagtcagttataaaaaacacggatactgtatttgtataatttccctgctccttctcctcattttgtttcctcccatgttcccctccccactctctcttaaattgatggcccccttttgtctaatttgtgtgggtgtgagggtgtgtgtgtttccatatgtatttcctagttaggtttctgttctcatgataagtaccatggccaaaaaagcaacttgggaaagacggagtttatttcagtttaagttgtagtccatatggagggaagtcagggcaggagttcaagacaggaacctggaggcaggaactgaagcagaggctgtggaggagcgctgcttactgccttgctccttttggtttggtcactttgccttcttattcactgtgggtccatttgcctagagatgccacagctcacagtggtgtggggcctgccacatcaatcatctgtcaatcaagaaaactgggtacaggccagtctgatggaggcattttctcagttgaggtatcttttctcatctctttagcttgtctcaagttgattaaagaaaaaaacaaaaaacaaaaaccaaccaaccaaacaaacctaaccaacataatgtgtgtctctgtgtgtgaattaatgtataaatgcaacctgctaagtccatttagtagtattttctggatgtttttagggatgcccatttggtattggataaccaattagggcagctcacccctgggaagacggattctcccttttctcagctgtcattaattttcctgcagctgttcattggggccttgtgagatgtctcttcatcctcattgtcatgtgagctggtggagccattgtttgagttttgtttaagcagtcatattgtagaggttacataagattagcttctctattatgtatagaagacagtgtctcacacatagttgacatcctattcctctggtttttacagtccttctgcctcctggtccctgacccttaggtgtaggagttatgttgtagatgtatccactgaggctgggcacccacagatttctgcattttgaccatttgtgtctttctgtttgtgacgtctgtgaaaagaagcttctttggtatggagtcagaggtgctcttctctgtgggaaagcgctaagatgaggataaatagtaagaatgcagttagaaattatcctagtttgggaaagtggcagcagaaggttttgtttgtttgttttgttttttcgagacagggtttctctgtgtagccctggctgtcctagaactcactctgtagaccaggctagcctcgaactcagaaatccacttgcctctgcctcccaagcgctgaaattaaaggcgtgcgccaccacgcccggctagaaggttctttatgttccattttccttaccagccatgggtagttggcaaggtgtataatactaggcacaaagtaccttttattcagtgggctgttggttagtgtcaagatgtacgtaccactgttgaacttttggggatatctgaccatgctggtcattgtaatgtttcataagcataattttactctacaacagggtttcatatagcccaggctggccttacctctatagccagagatagccttgaacctctgaacttcttgcctctacctctggagtatcaggattataggtgtgtgccaccacatctgatttaacatctgtggtggggatagaactcagcattttgtatatgccaggtaaatattctaccgtccaagctacatggccttgatgtgatcctcaggccccttaaaatatgcaatagcataatatttttatgttgtttgtttgtttgttaaagaaacctgagcaaaccaagcaagtggcgcttagtggggcagaggcaggtgtatttctgtgagttctaggcagcaagttttaggacagccaaggctacataagagaccctggtttgaaaagaaagaacaaaaggaacctacagcagatacataagaaataggaagaccaggatgatgactgtttgcgcagagaaatagtggggtaggtggggaatagggaagtacagaaaggttctgggaagcggcatttcactgtctgtttttgttttttgtttgttttgttttatatcatttgacttctcttttttgccttgatagtatgttaacaaataaagataagagaaaattacatggtcaaatttctgtctcnnnnnnnnnnnnnnnnnnnnccatctctccagccctttaaaaagaatttttttttttttttttttttttttttttttttttttttttttttttgagacagggtttctctgtgtagccctggctgccctggacctcactagatcccttggaactagaattacagactactatgagctatcatgtgggtgctggggattgaacccagatcctttggaaggggagccagtgttttttactctgagacatctgtctagccctccccccttcccccacagccttgtctttaaaaaatgaatttttatgtcttatccattttacattaagagtaaaactaagctgaatgcagtgattgtgcaagtaatcctagcacttagtagggatagacaggatgtttattacaagtttaagaccagcacaagctacaaaatgaattctacatagcctagaatgaagaaattgagattctctctcaaacagtgaagttaaatgttctctactacaaatatattttatattataacttttaaaaattaccaaacacaagggactggagagatggctcagacattaagagcactggcagttcttccagaggttgtgagttcaattcttagcaaccacatggtggctcataaccacctataatgagatctggtgccctcttctggcatgcaagcatacatacaggcagaacactatacataataaataaagaaatctttaaaaagttatcaatcacaagtatgttgttttaaaatccttttgcttattgtgatgagactatgatacccagaattctacttgtagcttactgaaattccagatatgcgtatgtgctaaatatttgttttcattttccactgctaggttgtattgaatagatttttcatgtattttaaaatactgacacatgtatatatctcctactgtgtatgtatatacatacatacacacacatatgtgaactaaatgagcaggactcctggtcttatagaatttacactttagttggcagagataggccacagtctgataatcacattaataagtatattacggcaactcaggctatgctatgaaaagagaaagcagctaaacagtaagtagaagcctctgacctagtctgggaggaggaaaagggattattttccttgaggagggacatctgagaagagatctgaagaggaatttaccagagaaactctcagacagagaaacagcctgtacagagtccatgagacaggagaataagttatatgaagaattgtaaaaaggctattaaagtaataaagaagtagcccaatatgtgaaggaacttaccaccaaggttgatgacttgagtttgatcccacatggtggaaggagagagccaattcctttaacatgtgtgatgtgtcacatgtgtgcctatacacacacacacacacacacagaataataataccttttccacatttaaaggtagtgaaatgggatcaataaggtatatgggctatggttcagtaagaacctaggacacaatctaaacacaattacactcttagtatggctttgttatttattcattaatttttctgtttatgtatgtatttttatggtgctgggtattcaatccagagtctcccacatgctaagcaagtgctctaccactgagtttcatgtttttaaacttttaatcatgagaatgaatttaaaattagtaatgcaatgttctatttgatgaactttaatttcgtagcttcttttactggcactattagaattctgtcttatatgctgataaaagaagcctacagattgtgattgaagtgatattgcttgctcttgcctgaattttggttagcatattaccttgggtttatgttggagcctctaaattgtgactggaatgtaaaagggcttgcatgttgagaccatctgtgggagctacattgtctgaaagttgacaagagatcatggcagatggcgaggtcaaaagattgactttttgagcttgacataatgtgctcatgaagctggaagaagaacttatgtttttaactaacagaagacttggaaacaggaaggcgtgtgcagttgctgagtgtggataaacaccatgcctcagcacacatggctgggttatatctgagactcaccagtattgccaaagatagcaatttctgaaaacattcagtgtcccattatcttcttgacattttggaaagtttaaagccacatatgaaaaatttgcaggtaattttaacattggtcaatacaaaaggaaaacaaaatcttttaaaagcatttaagatacttaacctttttaatcgtaattgaaaacatttctttttttggtttgtttgtttgtttttgtgttttttgagacagggtttctctgtatagccctggctgttctggaacttactctgtagaccaggctggcctggaattcacagagatgcacctgccactgcctctcaagagttagaattaaaggtgtgtgccaccactgtccagctttctcctgttttaaaattgcagtttgtgttgtattttttatttttcctttataaattattcattacttactttggaagaagcagcatcaagttttcatgggaaatgagcactgatttcgccctggtgttgattgcttacactgtgttgggtagtgttttattaactttatatgtgtcatcttattcagtgtagtgtaaactgcctttaatacttggcagaaaatagaaattgaggtgcagaaatattatgatacattttttcaataaacataagctcctttggctttattttaagcatttattgtttaggcagcatttagagaatcagtctgtgccacactttgctaagatgatacagagaatactaacaggatcgcacgtggctctcaggttcattgatgtggcaaacatcttttttgttggttgcttcttacttggtgttctgaaatagttagattctgttaacttcctaattttttaactatccttctctccatatgatactggggatatagtccagattcctggtaagccctctaattattgaactacatctccagtctttcatcagtttctttttatttgcttgaacaccacagtgctgttcagtagcctagtttttaggaaatatgatacagtattgaatattgagcacagagatgaagcagatgcatagagacaggcagctgtagtcatttcagccatgctctgggctcagggagggagaaaaaaggggatccttgtagccagatctgctagctcacttcattagtatctgcttatgtcttgttggcagcattaagtcatacattatatggacaaaccatctgtgaggaaggagaagagagcattttagtgaacacattgctaccttcaactttttaagtgagaggaaaataatagggaataatatctacccagaatctgtacatagaaagctcataaaacttaatgagttaaaatcatgtcttctgtgggaaagacttaatttcctgtcataaatgtattttagtaggttataaagtaatttaattttttgttttctgttattgtgtgtgtttgtgatgttatttatgttttaaatattttagagtattttatttttgagaattttatatatatatgaatttcatatatatgtatgtgatgtatttcatatatatatgaatttcatatatatatatatgaatttcatatatatatatgtgatgtatttttaccattcaggtgctcttttctattttatgaatttctcttatatcgcactgagtccagttcatgctggctgtatgtgcatgggtgtgggaaaattgaaagagacatttgtacttattagtgtgtgtgatgtatgtgggtggacatggtgcagcgtgtatatgaatatcagagtaccactgtgtggagtcagtccctcctcctacctttgcctaagttccagggctgttcagtaaatacctttgccctctcatctgtctctctggtcaggtgtgttttgagacagggtctcatgtagctcaggctgctttggagcttgctgtcatccaaggctggcatttaattactgattttcctatctctacattctcaggtgtgtcttttttttttcttcttttttcattttgagtgcctttcttttaactctagtgctttaaaatctatattaaaatttaatagatttcacttctgttttaagataatctaatatttgtttatttagttatttttgagacatagtttcactgaatggattaggctggtctggatctcactgtgctacttcgtggcctaagctggcctcacacttgtaatttcccttgtctcaactcccaagtcttcatgttatggcatgagctgccatggctggtgtgatgattttaaaagaaaaattatatgaaactctctctccaaaaatcaaataaacacacaaaaatgagaagagctacagaggcagggtagagaactgctggacgcctttgcccagattcaccgattataacagtttatacctgctttattttttccgtttcctctctgtctcatttgaaagtaagttcttgttatgatgcctctcacctcctgaagtattccagtttatttttctccctaagataaaggatgtttaacatatagaaagaccctatagtttatggactaatattcagaaacaacaatgaaatttgggcctggttgcttggacctgtaatcctagcatttagaagactgagacaagagaattctagacaggccagaactcagtagcaaaaccctatccgaaaagaaaggaaggaaggaaggaaggaaggaaggaaggaaggaaggaaggaaggaaggaaggaaggaaaagaaaggaggaaaaaaccatacatattttagtatgtggacttttccagttatcccaattttgaattgagttttcagggttgtttgttnnnnnnnnnnnnnnnnnnnnagtctccactaatggaattgaggagcttaggccattattttgaagactagctttcactgtgtatgtccctgatagtttttatggttcggttttgcttgttggacagcggtatctcagaaatgatattgcatccattcagttcacctgagactcctgatgacttgtctgattgttgttggccatttagtaactctgatcactgtgtgtcagttttctttactggaagttttgtattaagatatttataagtagctatttcaatattatgttaatattttgttgcacatttctagtaactagtgttaacctttgttgatgattcttcccttaattggcttattatgatggttgtggtggagtttcaccaagtgtagaattcattatacttactagttggcattctattgatctttctactttcctctattatctcttaattttgtgctttctccatgaagccctgatgtttctttcaatgcattatctaaagcaacatagtatatctctgctgtatccctcgagagaagagctgacttgtcaaattacttaactgctttaaaaccccagtttttatctggaatggagataataaagatacatattttcatggtgctgttctaaggtttactttagacagttcacttgcaagtacatgtctcagtaagtgacgcaaacattgcctgttattacattgctattccctctctttccctttaacaggatattttaaagaactgttgaagacgaaggtttttatttttgtgtgttttttaatggctttacagaatattaaacagaatactgtttgacatgacggcaaaaaatgtaagtatttgtaatttttaaaaattactttttaaagtgagcctatgctgttttgctatacagattttctcactattctggttaacaaaattcaaaacattgcctagatttataattggttttgattgtgtggtgtgtgagataaacttaatactattgaatacagtatttttatggccattatcggattcttgtagtttggtgccaagttgttcgttttcaacagctgcaagtagctatctctagaaagtttccaacttggctcctcttctggggactgttacaaatttgttttggttgctagagagttacttggccttactgagcacatctctggtttctttggcttgtttttcccctcttgtgtttgctcagggaagtgtgtgtgctctgatgttgtttggaaccaggttgctacattctctgaggtgttccctcaagaccaactctagaactgttggaaaagttttagaattgcttcccttttttttgaattgtcatttctttatatctctattataaagatgaaggaatgtcttaggaatccacaactaggaatttagtaccccctagaaagatccgagcctcaaacctggagtctgtcaggaactgcaacaggatttgttttcatagttcactcctttctggatgttgtctatcgtcttcatttcttcctcctccccactgaagatcgttttaggtccatagctagcctctctccatcctttatctgcatgttagagagaggtatgcaggaagggaaaaaagcagtctgacaatcttttgttgttcccgctaattgcagactctttgggaaagtgtttctcttaggaggtcagagaacatttgtttgtgtgtgtgcatgtgtttgtgtctgcgcagttacctttgccttttagatcatagttagggtcagggataatgaaagtcctattcaaaagccttgaggagccagttatggaagtgtatggctgtaatcccaactactcaggaggttgaggcaggaggataaatttgaggcaatatagcaagaccctgtctccaaacaaacaacaaacaaacacaaccagtcatcacagcaagatcaaatgtattgacttgtataattgaaaagtctagatttctgtggctttaaatatctctagctttaaggatttaagaatgacatcatatagtctgtctgtgcgtgtgtgtggcccagtcccatcttttggctgtatgtatggtagcataatggcttacttgggtcctgtagtgccggtttataagaaaataaggaactttctatttttctattttttatcaattttaaattctatagaggcggtttgattactctgcttggctcacacacgggtctaaacagtgtgtgggagtaaatgggatgtcagaagtacgaggtctgggctgggagcctctcctgttcatgtttcttaccagaattacgcagggtataggatggacccttttgccaagggagtgagagataaagtactgacatatattctctgcatctcttcaaatagtgcttactatccaatgagtcctctaaaccaaaaacttaggtatatcccattttaagttaccctagtatacaaaagagatttttttttctttttgagacacagtctggctatctaagccaagccaaccactcaaactcacagtctttatgcaaatgtgttctaagtgctgggattatagacatgcaggaacatgcctgtttcacaaaagataatttgcaatataatccaaggtatactgttttttgctttgtcaatgaaactttttttttacatatttgttaattttttatagaaaatagaaggcaaaaaaaattagccaatagattattagcacgattttgttcaggaagatgtttagtatatataaatgcacagtgtttacatatttatcaaccaaaatatatcaaataaaatgaagttataaaccctataatgaatacttttgcttattttaatacttctgttacattttaagatgctgttttattttactcatggtatggataatatactagtttcctaatattagtcatggttttcccatttttaaatgtttttatcctttacaaaattttaaactttatttgttgattgggtgtatctgtgctaattgagtatatgggtgtatctgtattaattgtttggtgtgtgtgtgcatgcgcgtgtgtgtgcataggggtaggcattcacatagctacagggtgcttgtgcaagtccgagaacaactttttctggaattggttctcttcttccagtgtggctgccgggattgaatctaggtcaccagtcttgtgtggagtgggtttacccattgaaccgtctctctggtcatatttgtaatttgaagcagggtctttgtagcccaggtttgcattgcatgcttcttctgcctcacaaaccctcagactactatcaagcaccactatagcattgttgtccaagagttttgatttaagataggatctcattatgtagcttaggctgggctagaactcatggcagctgggcagttgtctggctgcagtcttccgactggtaggaagtgtgagccatctttcttggcctttaatttttaagacaggatattcctgcttctcgctttctaggggttatagggaaacaccccacatgtgacatcgaacattttgttctctttcgctcatttgtcagattatttctatcagacaaaaatctttgaaaattacaaagtcctatttctgagtatgtatgacttttgtccagacattatttttctcccattcttgagtagcagcagagagattgaatgttggacctcatgcatgcgaggcaagtgctttattcctgaactgtactctgagcccttgcttgagtcatattgctaaatggtgttttctaaagactgcatgtttatttacttaccagtaatatgtgaaaataacatgtctcttattttatgcgtacacataagtacacacacacacacacacacacacacaaatcttcttttcctctgttaaaaataatggaaagagaatgttgagggggcagtgagcccaacagtagcaagagtactatctacaggtttttatttttaatatttgtcattctaaccagcaaaaagttatatgttgtttctttctgattactagttaggttagttatattctatgcatttattggttatctccatatctgtttggaaattgcatatgttgaaactggaatctattggcatttgaataataactaaaacaaatataacttgaccataagcaaatatgcacaattgtttgatgtaaaatattcagttctgttatttacatatttagtttttttagttttttgagacaaggtttctctgtgtagccctgctgtcctagaactcactatgtagactaggctatcctcagacttacagaaatccatctgcctctgccttcctagactaagatcaaaggcatgtaccaccattgcattccaaaatcatcttgcctgtgaaagttagagtttacttttaggtacaaatcatctcatttgaattgttttccaagttatatcagaaatattaaatattggtacagtttgtaatattcttatttatgatttgattattaaaaataatgttattttatttagcatacatttagtgattattcacagattgtagtacagcattgtaatacccagatatcatttcatatatatttatcttatatcatgtttataccttaaacccattaaacttgtttaaaaaattttaaaagatttatgtatttatttatttatgagtacactgtagctgtcttcagacacaccagaagagggcatccgatcccattacagatggttgtgagccaccatgtggttgctgggaattgaacttaggacctctggaagagcagtcagtgctcttaaatcgctgagccatctctccagccccaaacttgtttaagttaattaagaaaatttatagtgaaatacctagggagaaggtatctcttatctgattaggcaaagagtataacatgagttatggattcttttttttcccctccttttgctcaaggaaatattctttttggttgttgttattgttgtggtttagagacagaatttcactgtgtagcttaggctgtcctggaactcactatgtaaggttggccttgatcttggcttcctcctaggtcagcctctcaaattctgggatcacagatgtgtatcaccatgcccactttagttccttttttattttaattaatccattttaagatttattttattggttgtgtgtgtgtgtgtgtgtgtgtgtgtgtacacgtgactatacatgtgcgtgtgtgcatatgtctgtggagaataggttgcaggatgtcttgaattggaattataggagattgtaagctccaccatcttgaatgctgggaatcaaatctgatctccgcaagagcagtgatcacttttgctcattctctctaaccttatgattccttatttgtctttttgaaacaggatctaactatccctggctagcctggaacttgatagattatttctctgctggtgaaatgagccaattcaaaccagatttttatattaaaggcaggtttatttagaaactgcttttgggtgatttcactggccccaaggattgaggccagaggaattgccaaggggatagaggggctaggggaggagaagagagagagagagagagagagagagagagagagagagagagagagagagagagagagagagagagagagaaagggaataagggtctgaggacagagagacagagacagacagagacagagacagacagacacagagaaacagacctaattgtctggattatatagggaggagcctctgagggaagggcacctcagcccctgggatggaaagttcaaggttgaaggcagggtatgacatgtagggactgagggatgctgggagaggccaggtctgtaaaattttgatatgtaaaatatccacctcagtctcttgcttctgggtcctaaccaagacagaactcaactgtatagaccagaatggccttaaactcagagatttgcctcccaagcactgggagtaagggctagtaccactttatcccagtccttaattcttttttaaatagaaggaaataatacttttgttgtttgtgtgtgtgtgtgttttgagacagggtcctccagagctctggctgtcctggagctcactatgataccaggctggcctcagactctcagatatccacctgcttctgctccttgagtgctgagattaaagactgtgccactgggccctgcaaagtgcacatgcctgtggaggccagagtcactggatttcttggagcttgaggtacagatggttctaagctgcctgacatggagctgcataatatacattcttaatcactgagccatttttccagcctgggaaagaatattttaaaatgtcttccctagccaacttttttatttttaagtactgtactttgagtctttaaactacaaagaataaaaacagaatttaatatgtactttaatttattaaatgggttttggcagtatttttaggaacgttaaattaataccttacttctaagataaaacttaggctgtcatagtgagactcaattggcctttatctaatttttaactgtacagttaagatatgggtgtaagtacactatagctgtcttcagacacaccacaaaagggcgtcagatctcattacggatggtcatgaaccaccatgtgattgctgggatttgaactcaggaccttcggaaaagctgtcagtgctcttaactgctgagccatcactccagcccccaagatatgggtgtctaagtttgtggatttgtttgctgcttacgctgcagaaacggcatgaagaacagtgttaaaacctaacagtaaccctctactgtgaacatgtgatttttgttgtggtttggtttttttttaaactattatttttataaaataagaaaaatgtaaatgactcttctgaagttatatgtatttaatattaatcatgggatgaatatattttaaaaatgtctgtcatttttgctttcttttcgaagtaggactgactaaagttttgttttctctttgtagcagaagtgcttgcttatgatgttgggtgggcgtcttagtaacgacagcacacatcaacagatgctcagttgcctaaatgtttaacgttatatttgtgagtagtacaggggagccatgatatggctgttggttgcagtgggggtttttgtttgtttgtttaaagctaactaaacttaaatctcagtgcaaagtatccacaccattacatagacttgagaagctagtttcatctcagtgtcaatttctgtcataaaattttgattttaggtgccatttatctattattcagaattactgggctgtgttaaatgtatatagaaatgttttggtaaaaagcaagttcacttagtaaaggattttaaccactgactaatgaaaccattagctcttaaactattcaattgtaatggactaagtatgtgcttatgaaggatatataatgtaaaacattacatagttttttaaaatagtccattgtgagtctagagagatggctcagcagttaagagaactagctgctcttctagaactcttgggtgtgatttccagcacccacatggcagcttacaactgtctgtaacaacagtttcaaaggctctcatactctcttcttgcctctgtgggcaccaggcacaaatggttcatagatgtacatacaggcaaaatatccatacatataaaataataacaaaaacttattaaagccaagtctacaaagttttaaaactttacatttaaaccttaaaattctttcaaattactgaagaactgatttgcagcacagtgatgttcattgttgtattgtatacttctaatttgttacatacttctaatttgttacattcctatgactgctttctcattgctacctcacagcgaatcttcctagttcatattcatggtctctctaccttctactccctctgtctgtctgttggtctgtcctccctcctctctctgggaccctctcactgggattagacgttccaccctattctcctattctcttctacccagctagttggcttatccttttattaaccaatcagagatgatagaaaacaatttttacataacactgagaccagagatgcttgaccttgcaaccagatgtctgggcatagaaatcagcatctgaatacacagtgcacaaaaccatcccccaaccttatgttatggattagaatagtttgtttcagaggaggggctgttcagggaattgaacccagagattttgacgtgtaaattaaaacctgctgagctatacaccagcacagattaatactaaattaaatctactcagtacatagactcatgcacacacacaacataccataaaagtaagaatttgttaactagcatgattgtagtgattatttaataatgtagacatggactgggccgtggtagtacgtgcctttaatcccagctcttgggaggtagagacaggtgggtctcttgagtttgacattagtctggtctacaggacagtcagggctacaaagagaaaccttgtctcaaaaaaccagtgatgatgatggtggtagtggtggtggtggtgggctggagagatggctcagtggttgctctccagaagccccagattcagttctcagcacccatatggtagttcacaactgtctgtaactacatttcttgggggatctgatgccctcataaagacatacatgtaggcaaaacaccattacacataaaataaaaaacttataaaaacaatgtagacatgtatcaaaatatcaagataatgatcaatagtttgagaccatatgagttttattacagtaaacttttaaatgtatctttgaaaagaagttttgaggtaccaaattacaaatttgaaatgttgaaagtttacagaatattccaagtttgtaatattgtaagactacaactctttagtgtataaaaccataatgtatagtaatgagtccatgtattataacttgctttgagttaagttgtttttgtacatttgttttgttgttgttgttgttgttgttgtttcttctacacaaggtttctttgtgtaatcctggctgtcctgtagaccaggactcagatattgagctaaataaaaaaaatattttgtgtgtatatggtgtgggggactatctgcatgccagggtgtacttggaaaggtcagagggcaacttggtgaaatttttccttttttacctttatgtgggtttgagtttgaactcagatcttcagtctggctcagcaagcactttatctactgagccatcttaatggcttgtgtgccatgttttcaaaatggggattcccctaggctctgaagcaaattttaaaattctgatggaaatcaagagtagtcatgcattcctgtaatttcagcgttctcaagatagaggatggaggatcagaagactaatcctcagctatacagtttgaggccagcccggggtatgtgaggctctgtatccaaaacaaaaaacaaatatttcttatgatactggcattttcatctaagattccaggtagccgtgtaaaatattatattaagtgaaataaaccatctgaagggagattataaacttacttgctgtagagattactgagacaaactaataaaaagtgaatgttgacacagattgaagaatgtgtgccgtgtactgtgccgtgtactgtgcatactcatccccttgggtcttcctcacaaccagaattagtaaggactggaagcacattctactttgccaatttgtaacttgaatggcttgactaaggcacacagcagtgggttctgtaatccagtgtggacccagataaatgacttgaggctgctgtccttgtacttagggtatttgtggtacttatgtggtagttcttaaaatcattgtgggaatgattaagagcatgagaaattaaggacagcaatgaggatgtagttttatactcttctttttatagtgctagagagcaaattagggcattgcacatgctaggcaagtgttctgctgctgagccaagcccccagccctagggatggaagtgtgatttatctgttggcagctgcgtattacttgccttcaaagtatttagaaaatttgtggattttgatttaactcataagtagcattccattaatttttaatctaaaattcgtagttttcccatttcaagcagcatttttcttttagtaacatattcctatggatgatataattagtttatttcataagactacatataacacttgatacagacttctggtggaaaatataaaatattttattacataattttacaatacttcagatcgagtattaatttttttttattcaggttggtttgccatccacaaatgcagagctgaggggctttatagatcagaatttcagtccaacgaaaggtaaggattattgaataaacatttctggatttaatttttttgaagttttcctataacatatacaattataagaattcctttgcgtataatagtacataatgttaggatgttatcacataccaactcgtatgtcagttgtctgtaagaggtagaaggtctttgtgtatctttttctctatctccttctttagtagtctcaaagccctagtgatcttattcctgttgacatgtttcaaatctacttttttttttttttggtgtggctatagttagtaatgtttatggagctgagacaggaggattgctatgagtttgagaccagtgtgggctttatacctagtttcaggctagtttgaactgtttcaaaaaccaaacaaaactagatgggagttaaaaggcccagtgggccccagctttcccatcatttgtagttattggctgattgaggaaagacaggaaggaaagacaattccttcagaggtgtagtgacgtgtcaggtgcccatgctcctgaaacaaccttaacgagagctattggatcaccaaaaaccaaagcattaaaacaataatgacagtaggaagaagactagttgggaaggggaagagattagaagaggtaggagggagataaatgctgtgacagggagacagatgtgattgacatacattttatacatgtataaacttacaatgaaatcattattatgtatcgttaatataggctagtaaaacatttaaaaattaaaaactttcccccaattttctactttcaagttaagttgtaagaaaatgcagttaaaaaaaaagtaatatatctgttttctaacagataaatttctgtaatgcatgactttctgggttacttacttaatatcagaaatctgactcaccatctaagaatgtaggcatacgtgatgaaatatttatggatgaaacgatagaatgtctgcagttagattcagaatagtctactctgagattagaacacatgacattacagataaagtgatattctttataaggtgattgagtattcagactgggtgacggctgtgtggggtttcattatttctctttcctgatttgtagatgcttgacattttccattgtacagactaagaacaaaatattgccactgtattccagttttgagaaaatgccagcttctttaaaagatttgtgtactgtctgagatgtgtcatagaggctactgaagtctatgcctcacataaaaatatctaacttagtaaataatattaatagtcagtaggagttactctgagagcttatgtgctattaaagtatttgagaaatactttaagtcttggtgcttctcaccccacccccatgatgtcatatacagaaaacggtaatagaaccattactggttactttttgaatgcactagggctaaacaaaaggactgttaaaagtcatacgtataatacctgggagctcatagccaccccaaaccataggtggaaggagatcactatcttttttgtttggttggttggttggttggttgtttgcttagttgtttggttggttcgtttttttgggatagttttgttgttgttgttttggtttgggtttttttttttttttttggtagccctggttgtcctggaactcatcctgtacaccagcctggcctggaattcacagagatccacctgtgtctgcctcccaggtgctgggattaaagatgtgcgccatcctcacccagctaggagacacttacagcagcagacttcctggtcctctgattcttagtttttctgtcctctcttccatgaagtcttgagccttgggtgcaggagttgtgttgatgctgagccttccgcaattagttattttctcctcattaatctcgtgtgtgtgtgtgtgtgtgtgtgtgtgtgtgtgtgtgtgtttagtggtctctgttgcaaaggatgcttctttgatgagagatgagaggtactcttatctgtgggtataagggtaagtattttgaatgtagttaggaattatgctggcttagtaaactggtggttgtagttttcttctaaagtccatgattttgttagactcaggtagtgatcaggcttggtgtcaagcacttttacctgctgagccattttaccagcccccatcaactcaaaccttaatttcatttttttgtgagttttttgtttgttttttcctttgagataagatcttgctagatagtccagtatagcctgaaattttctaatccctgttgttagtcaggattctctaacctctaagtttatctatcccaattatacttctgaacgtggaagatacccacaggttgagttcagggcagctggacctgctgtgagttgcacttcagccacagtgtgtcttaggatcttccagtattagtgccaattcagaaccagtatccagtggaccccagaaagtctgcttgtttcttttcttccagatgtatagctacccttggtaaaggctgaggtccctctcgggaagaactggagaaagtctaacagtaaaacttctaggtattttatcatccttcctcgggggaacttggctgtcctcactcaaggggtttgggtcagcaaattggctcaagtctggaaatgggttcacaagccaagattatcttttgccatgatccaatgtttctttcatttgtctgagaatttttctgcttatataggtcaaacaaaaattcagtagtttttttgtttttgtttttgttttgttttttttttaatctattgcatgcctgaaaataccatgactgtttactggtaccagaggtctctatgagtcatgctaccataaaattctctttgcctgtgctgaccattacaggtcaggcattgtggacacagctttgtctgacctgccatttggtgattcagtgctgccatctggcccctatgacctaaagcccaattaaacccattgcattgagttcatccaaccaagcaaaagttggatgcaaggaaaagggcatcaacgaagctcttcaaatgtgctggtgccctctcaccttttgcatcttacaggattggtgaagaatatgtcttctgggccttcccatcgtggaggattaggttttatacagagtacccactctagcattgcagtttccaccactttaaaatctctgcatcaatttattaagtcaggggatatcagccatcttcagtttttcagtaggccatcttttgacaaatgcttcagccaaccattcatacaaatttttgatccccccttttttttagctgtctaagcatctgtattaaacctagaatctccactaagagggttcatatcaataagctcagctttatccagttttatgtttcttccaccgttatcccaaacacttaaaatccgttcccacatacattccacagacttctgcttaaatgaattagcaaactcattaagctctatagtagtgtagcacacgtcctcatggctgcactttatactttacctctaggagcctgcttaaccttgagtctagtatataggtctagaggcaacaactggtgggccctgaggaacatcagtgttgtcttgcctggtatctcttaagagaaagtcacagctggtttagcagacaatgtagtattaattacctcacttaaccgtgaaaggggcaatattttcagaggatggggtgtgtatatcttttgctgaaggcagagactacttccttaggtgagataaactcttgagaatctgagggtttaaagttcttagcttcaatagcatcctcccacacatttgcatcccgagttacaggaccaattctttaccaattaatgctcttactttagctactgtcacctccaaagctgggacttgaatttttgctgtaattcaaccaactttataacgagggctgtggtttgtttttccacaacttgagctctgtgggtgctggagagaagatcctcttccaaggcacacttagaaaactttagactgtttatatgcccctgaagccagtcagttttgttactaagtccttcaccgtatcctgagaatctagaagttggttagttttatcacagagctagttcttttcttttgtcagtttatctagagatgctagaagaagccaagaaacagcagcattttccttatttttctacaacttgtcaaaagttttatattcctagttaccaaatctgttgccctcacagttggttaatcaggataatcaaatgcatttgtctcactgagtctgtaaaactttagtgctctctgagcgtgcaggagaacttgagtaactatagttgttggcgaattggaaagcctattccagatacttaaaatattcatccttctgttactctagaaccactactgctactaaaatctgtattctctagagtaacagaacttacagaatgaatctctctttggaaaagggacttattagaataacttacaggctatgatcctgtaagtccaacaatggctgcctatgaagaggagttccagcaatccaatacttattcagtccacaaggctgatgtctcagttggtcttcagtatactctggaatcccaaagtagtccctagtgctagtgaaggaatggatttgctagtgaggacaagagcaagcaggcaaagagccgaggcttgcttcttccatgacctttctataggcttccagcagagggtatggtttagattaaaagtgagtctttccaccttaaaagctctggattaaaggtgtgttcttctacctcaaagatccagattagaagtagatctcacaatcacatggactggctttgaactgacatatttttctgcttctgtttcctaagtgataaggttacagggcatgtgctaccatatctagcttcatttagcttatatacattttaattttatttgggcacttggaatctgcctcatgtatgtatggtttgagacttagtcaaagaatgggcattttatacacaggaggtgaagaattccttctgattgggtctcttctcccattttctaccatcatttttttttaccagacatatttgtctaaacttctgttttctaggtttttttttttgagccagggacaccatttttttttttatggaagtttagcagagcatatagattgatgctttttcttttagttaaaagtcataaaatatggtgaatatactatatttttgttgtcatttgatcaagcatgactgttgatctctctataattttagaaaatccaaaaaatatttaatgtggaatttctagttatctgcaataggattgtttggtgttattgaggcatccagcttgaagtgtgtgtgagggatgtctctgcaaacagcagtgccagcagagtaacaatctacgtgaggcaagaagggggtctgcttcagcaggactcagtagcctgtgttggttcaaacttcaaaagtctgacactgagcgctttattttaagcatatttaattacagtacaatttccaaaagcatttttttttctggtacacaatcccatgtgcgcaataaagcttaaggcataattacattgagactcatttgcaagttcatgtcatctcttccataaagatggcttctgttgatagactacatgtattatcctaaagggctggggaagatctggtgtggtctcatacagagagcaagaggtcacctaagctattaatcacctctggttctgtttgtaagactctggggaaaacagatgtggcctcagtcatagggtagttcagaggtcactagctattaaccacatccattcccagccttctgggcaaaaaaaaccccacaaaaaaccaaaaacagggcatacacctcttccattgaagagcctttaacacattcctggtttccctggggctgatctatgagctcaggggatttttgccttctacactcaaggactgaatacctactagtttctcaggtgtggtttagctgttgttactattttaaagcttatttaataaattcttatatgggtatatttatacatacatgcatacatacatacgtacatgctcacttactcactctaccctgtagttctgtttctcttgagaaccctgtctaaaacaaccatgtttttctcattaaataattggcctaccatgtaatactgtagtttttccaattgtcaaaatatgttccattcttttttttttttaaagatttatttatttgttttacgaatgtgagtatatactgttgctgtcttcagacacaccagaagagggcatcagaccccattacagatgattgtgagccaccatgtagttgctggaaattgaacgcaggacctttggaagagcagtcagtattcttttttggttttttgagacagggtttctctgtgtagctctggctgtcctggaactcactttgtagatcaggctggccttgaactcagaaatctgcctgcctctgcctcccgagtgctgggattaaaggcgtgtgccaccacgcctggcagcagtcagtattcttaaccactgaggccatttttccagccccaaaatatgtttcttatacttcaaaatactaggaacaaatgtaatatgattataactgtataaaatgactacagaaaaatatttgaaagaaatagttgttttacttttgtatataggaggtggggaggtagnnnnnnnnnnnnnnnnnnnnnnnnnnnnnnnnnnnnnnnnnnnnnnnnnnnnnnnnnnnnnnnnnnnnnnnnnnnnnnnnnnnnnnnnnnnnnnnnnnnnnnnnnnnnnnnnnnnnnnnnnnnnnnnnnnnnnnnnnnnnnnnnnnnnnnnnnnnnnnnnnnnnnnnnnnnnnnnnnnnnnnnnnnnnnnnnnnnnnnnnnnnnnnnnnnnnnnnnnnnnnnnnnnnnnnnnnnnnnnnnnnnnnnnnnnnnnnnnnnnnnnnnnnnnnnnnnnnnnnnnnnnnnnnnnnnnnnnnnnnnnnnnnnnnnnnnnnnnnnnnnnnnnnnnnnnnnnnnnnnnnnnnnnnnnnnnnnnnnnnnnnnnnnnnnnnnnnnnnnnnnnnnnnnnnnnnnnnnnnnnnnnnnnnnnnnnnnnnnnnnnnnnnnnnnnnnnnnnnnnnnnnnnnnnnnnnnnnnnnnnnnnnnnnnnnnnnnnnnnnnnnnnnnnnnnnnnnnnnnnnnnnnnnnnnnnnnnnnnnnnnnnnnnnnnnnnnnnnnnnnnnnnnnnnnnnnnnnnnnnnnnnnnnnnnnnnnnnnnnnnnnnnnnnnnnnnnnnnnnnccagtacaggggaacgccaggggcaaaaagtgagaatgggtgggtagaggagtggggggggggagggtatgggggacttttggcattggaaatgtaactgaggaaaaatacgtaataaaatatattaaaaaaatatataaatatatatatttatttatatatatataaatatatatatatttttatatatatatttatatatataaataaataatatatataaataaatatatatttttatatataaataattataaattataaatatatatataaataattatatatttatatatatataaataaataaaaatatatatataaaaaaataaaaatttttttaaaaaaaggaaagggtttctttgccttacaggcccatatcacccactgttggaaggaattcaaatggggcaggaacctggaggcaggagctgatgcagaggccatggagaggtgctgcttactggcttgctcagcctgctttctaccagcccagtatggcatgaccaacaacaggctgggccctgtcacatcgatgactaattaagaaagccctagagggttgctgacagcctgatctcatggaggcatttttaaaattgatgttctcttctctcatgaatttaacttgtgtcacgttgacataaaactctctgtcacaatttatcatttgtcaacgccacaaaaaaaaaatcaccattaagccacaaccttttctttctcattcatccctaagatctcattaaaaacaaataactttaaaagttatttacacgtttacaatgtaaaagtttttacaacttcaattcaatacaaattccagcagattgaaagtttagtgcagacggtcaccatgcagcgtgggcaggtggaagcaccccagaggcccagaggcccagaggcccagaggtgggcatcgccaaggtgaacatgcgtgtggtggtaagatgggagagaaagacaagcaaggatggtttgtgcaatgtgaagagagatggaactggagacatgagggtggtgaggaacagcatgatgtgagtagcctgtgtgccacttgaggccatggtgattactgccatggacggccatgtcttggtctgtagccctgcagcagcctggggctttattgatgtttgtggtccatgttaccaccaaaggttatgaggacattcctggtctgggctgccacctgtgactatgttgataactgagggctgtgtagaaatagccccacccctcgcctgggcaaagcaggatagctggctctggtgacaagtacacagaagagctggcaggctgaccaactcagctcccacccaggctgagatcccgggctttgagttggtccacccccaaatctacccaattgatgaactgctagtagttagtgaagggcagtcctgcggaagcaaagcttcaggatctccatgacactggcgacaacaggatatctgagaggagccctagagttgatagtgtagcagaagccaggggcctctaaccagattagtgactcattgcaatgaacatttgcaagtaaagctgttaggacagaaggggacactgtgtgacactgtgacacaccacagcttccactctagagatttgtctttgtcttttgagggaagtgtacaagggtgggtgtggatatgaagggatggggaggtgagtggggatgggaaattcacacacacacacacacacacacacacacacacacacacaaatcagtaactagtttttttaaaaagctcattccctttaaaatattcagtctgtataaaagtccaaaaactttatttttttttttgagactgttactctgtgtagccaaaatctctcaactgtgggctcctgtgcaagtcaaaattaagttaaatactttcttacttcaagagggaagaaccagggcaccaccacaatcagatcagcagaaaaccaaactctcaacagtatatatagcaccatgttcaatgtctgggatccacgcatgatcttctgggatcactttttcagctccaccctcagcagcctacagaacttattttctaagcttgggccagctccatttcacacctgtggtcctcctgtggtcctcctgtggtcctcctgtggtaccagcatcttcaaaactctgggatctttcactgcagctgttctgcactttcaccaacagcccctccaaggctctctttgtggtgctgacccttagcttctcggcatgcccgcccatgctcccccacccccacttcagtccttgtccttcaactaccactgaggcagaaccttcaccaatggcctcttctggcctctcacagttccaagcctcacctgctctccacgactccttcatgacttcaaaaccgtaccacctggagactcttagactatcaagtttgactgctattgcaaggcataaccttggccacttcggaacacgtcttacaatgtgatgaattttagggaacactcaccagatttcacctcagtgatgctggtctcttcttaatcactggtaatttttagctccagatgaccagcatcaattgtcctagttaaaaaaaaagggggggtgtattgtagtggttctggtctcctgttaaacatggctgattgttctgctccagctgatcagataactcagagtcttcacacaaatggcctagtggagtctttgttttcctctgacacttcacaagccaggcctttatcatctgcattgctctcaacattatctcccaagctccacagagctctcaacactcaatggattttctaactcagatttccaaactccttgcacagtccttttcaaaacatggtcaggttatcacatcaatattccataatgctggcaccagtttgccttagttcaggttactgttgctatgataaaataccatgatcaaagtagcttggctaggaaagggtttgtttggcttacacttttccttcttcactgaaggaatcaggacaggaactcaaacggcaggaatcaggaggcaggagctgatgcagaggtcatggcggagtactgcttattggcttgctcctcatgactggctcggcctgctttcttatagcacccaggaccaccagcccagggatggaaccactcacaatgggctggctcctccctctttaatgactagttaagagaagtggcctagaggcttgcctacggcctgttcttacggaaacattttcctaactgaggttcccttctctcagacgactttaaatcatgctaacttaacataaaactatctagtacagacggtataaagcacacatttgtctgtccacatacttattttgagatgaggtcttgctgtgtagctcaggctgtcttttcaactcatggccctcccccttctacctcaagtgcccttcactgtaccaggctgcattttaatggaattcatcacttgattgcaagttaagaggttagagagttttatcttattcattattgcattcatcactgtcctagaggacaaacatttcgaaagtcttatcttatagaatctttctcaaagtaggaacattgaaagaatttatgctatctacctgtaggtactttaaccactggccaaacgtgtatgtactcttgaaatctggctcagcccctccttgtcttgtgcactgtgtgccacctttggaccctgtacacactcatcactgccttctcacatgattgccattcattacggttctctaccagactgagagctccctgagggcagggtccggcttctcgtttcactttcagagtctcattaagagtctacagttagtaaatattgaactgtaagagcttgtttactgtaacctactcctagttcttatcacgtcatttaacttttgagaagtgaggtgtctcaagcacttacttttaaaacaaaatgttaatgtacttagtgagaagcatgtctgacctttttgttttgagacaagtatttctagagttggaaggttaaaagttagttgtacagttagggcaagactgaggctcattatatgctccccgtggtgagtggatagcatctgcagcacagatagatacactgggggagaatccaagatcggacgtattacctccttctggatttgagatacttttgtaccacagttgacttcttgactgtagttaattgaaagcatagaagtgatcgtatagcctgccaccctgggaaagccattatttgttctagtagctcttctgtaacctatattgccatgccacccgggattaaagacatcttatttctgcatttccgttgtttctttcctaatttcactggttaggtctatcaattgctcttatccttcttaggtttgaagataggatctctcattaaacctgaaagtcattgatttggctaggctggcaatgattgtgtgataggatatttttagctcattaatatggtaagttaattgggtaggtttttatatttcataccaaatttgaatttcttaggtaagaccatttagttacctgggtcgtgtctgaggcctgtgatccttgcacttgggagattaaggcaaaagagaactgccataagttcaatgttaacctgggcttcagacagagactctatctcagcataacaaaacactacccaacagctataaaagaaatttctaattctgcatttggggtattgttgagtaaaacctttattgttgttgtgtttttaatcctttattatcttaagagatgattgtgggagaatcattgaatgctacttaaaagtattattagtaattctctaaccttggctatcctgagactcataatgtatgccagactgtcctccaactctgaatttggactgcctctgcatcctgcgcactctgggattagaggtttgcactaccatgcccagcagtggtcagagtcgtaacaaatgtggtgatgtggtgggttacatagatagagttccatggtcagttcagcagatgctgatctattcctgtgtgtgtgcatgagagagagcatgatctcacatagcctggactggccttgagttttctgtgtagccaacagtgtccttgagcagtctcctgcctccacttcccaggttctgggattataatcatgctatgcccagaaccatattcttttctttatttgataaatcaagccctgagatacttagtactaaagtttctgctttattttgtactactttgaggaatagggaaatagcatatggttgctatttctataacagttccttggcagacttctgaagataaggtcatgttagggtgagtttggcctcttccttactgggcgaggcttggtggaggttgtattttagtgaacgtagtgaatggatctggcttagtccttgagtctgtatttggtttcaagatattttaaaatatctcaatgatttgaacatagactcttgcaaactattctacaagtagtcttatctatggacctattcactgtagtcttttcctaaaggatgtgatctactaatttcctcacttatattttctgtttatcttcaagataaagtatattgaaattacaatgataggtctgtcatgttacataactaaataatagaataaatgagaattcacttttggaagtgaaaatcgagagccagatatagtagcagctgctagtaatttttacacttgaaagtgtgaggcaggaggatcaggtatccaaagtcaaacttgggttacagagttagacctccatctcaaaaagcaaaacaaacacatataccaaagaataagagaaagaaaagaagatccaagcagattccaatttaaaacaaaagattttaaaaaagaagaagaagaaaagacctaagtaaaagagactggtcactcactctcttctctgttaactgctttcatggcttatattggggtgggtagaattatgtaatggtctagtttttagccatatattctagaggtataaatacaagagtccttttgtttgcttgtttttagatttatttattctgtgtgtcttgcctgcatatgtatgtgtacatatgcttgcatggtacccaacgaggtcagaaggtgtctgatgtcttgcaactggaattgcagatagctgtaagcttccttgagcatgtgggaattgaacctggctcctccacaagagcaataagtgttcttaactgctgagccatttctatagccctttagataactttggtaatgtagcttgttattgcttggcccacaataaagtgacagactggctgcccctccccaggaattatagaaatacaccagcctctgccttctgagtactgaaataaaggtttgtgcctgtcttttgtccttttcttttctttcaagacagggcctcttatagtatagtctggactttgtaaccgaggatggccttgaactcctgatccagtgctgggattccagggaggttctgccgttgctgaacttcagaaagttttgtgctagtatctttcagtttgacagtgtgcccaacttgcttatccactcacgagttgaacactggtcgtatttccaactgtggttgttatgagtgagactgctgtgagcttcaaataaacgtttatgtgttgacacacgttttcattttccaaaggtaaataaatacctacaagtggaattgctgggtcatacggtaagtatgtgtttaactttttaagaaatcacaaagcatgtttcccaaagtatttaagttgatatcccaattagcaatgtttttagtgtcctttctactgtcctttgaatggtcagggattgattttgtttgctttctttattctgttaaagtgaatttgctatctcaagatttacttagccttccttactttttcttggtttgaggaccagtgttagaaagattgttttagtagttcagagcatgggctgctcttgcagaggacatggctgaattctagcacctatgtggcagctcacaaccatctgtaactctacttacaggggatctgacactttcttcttagtctccacaggcacttagtacacacatggtacacagacacatgtaagtaaatactcctacacataaacaaatttcagaagtatttatttggaatgatgtacatttatttggaagtaggcacaccaaaggcatgtaaaacacagagcaactttcaggagttagttttctccttccacctcgtgggttccagtgatttaactcaagccatctgccattggcttactttttgagtctctccttaccccatccctttctctttgaaatagggcctcacacatcctaggctggtcttgagcttactacattgctaaggatgaccttgaacttttaattcctctgcttccactgctagagtgatggaaatacaggcaggtgacaccgtatccagtttatggtgatcacagtaaagctttgtgcatgcaagtaaggcactcttactagctgagctacagcctcaaccccttccttaattttgtattggcttgtttatcttactgtttaattctggatatgagtctttatcatatgaatataacaaacattttctcctatcctgttacttttaggtttgaactacattcttgaagagcagttatttttacgttaatgtaaaatttaccaactaaaagtatgctttaaagttaagcatgtattacatgcttgtaattagaggcagaagtaggaagacctagagtttaagaccagcctaggctacacagtcaattttaggatattctgggatgcatagccaaattgtgtcttgagacaaaagaaaatatgagcttattttactaacactttctcctacctttttatttagaagttttataattataactcatttaaatctagtaaagttttaactcatcttgtatatggaatgagatgagggataaattttctatttttacatgtgaatatctaatgatttcagtattatataatgagaatactccacagtgctggggcagtgaggtgggggagttgtaaaggaaaaaggaagaaagcaccagcctaccgagtgtagtgactgctgcctgtaatgctagcgcttgggaggataaggcaagagcatcacctcaaggctggttacagagtgaggccctgtcttaaacagacagattgcagggcagggcagcagaggcaggtggatctctgcgagttcaaggcaagcctggtctacatagcaagttgcagaacagccaggactacacaaaaagatactgtctcaaacaaacaaacaaacaaacaaacaaacaaacaaaaagatcaggctcccgaagaaagtttcatgaaccaaactaaagattctgagacagaatatcaaggacaaggtgtacgtgcaaatgtaaggaagtgggctctttctgtttagctgcttgtagctccttgtgttgtaaagtcttttctatagctcatttctttctcctgcttttctctctaattaccttagtgaccatagttctctatacacatagtgtatatccatatgtaaagaaacgactagttggaagtagcagagaagacaatcagtaaacggtgtgcatttttttcaggtctgtcttagttcatttcatgtggctataacaagatacctaaatacttaataaaattaagaggtgtatttaggtcacagttttggaggccacaattgcaaaatcaactctggccttttggtaagtctgcaatcatagtataccagatggtaaaatgacatgtaagaaaagggggaggaagagaggcaaagagggaggtgggggaggaaaggaaggagggagggagggagggaggggaggggaaggaaagaaggagggagaatatgaactcagggcaagataagaaggaagggagttggggagatcaagtgtcatctttttataatagtctgttcacacaagaattaagacctaaccattctttgaggccagcgttgatgagatttgagcctataaaccaactctgaaagttttcatcccttagatattgttatttctttccagtgctatattggtaaccatctttcagcatatgatcattttggggacacaatcatatctaaactaaggcaaagtcctatacaatataaactcagaaagctttttgctgtagtgttaaagcaaatggattttgtttgttcttcaaaggtttatcttttaggggcctgtgcaatgcctcagtgggtaaaatgcaggggcctaataacagagcttagacatgaaatccacagtggaaggaaagtcctgaagcttgtcctctggaaccccagatacatgcaatggttggtacatgttgtgaaagcatgtgagagaatgcatgtatacacacacacgcacacacacacacacacacacacacacacatgtgggcacgcacaccccaaaatttaagagtctggccgggcgtggtggcgcacgcctttaatcccagcacttgggagcagaggcaggcggatttctgagttcaaggccagcctggcctacaaagtgagttccaggacagccagggctacacagagaaaccctgtcttgaaacccccccccccaataaaaaaaaagtctttggcatgagttcattaagaaaaagttatgaagggagccctggttagatggcttagctgtttttcctgttttcaaaccagggttgactaataactgtaactctaatgtcaggggatctgatatctgtcttattttgttttctttttttctttttctttttttaagatttatttattattatatgtaagtacactgtagctgtcttcagaagagggcatcagatctcattacagatggttgtgagccaacatgtggttgctgggatttgaactcaggaccttcagaagagccagtgctcttacccactgagccaactcgccagcccttattctgttttctatgggtactgtatatacacggtgcacagatacatattcaggcaaagcaaccatgcacataaaataaatcttcagaaagaagttcatttgttgaaaccttaatcttaagcagagctttaagacttcaaacctaatgaagtcctagatcatttgaagtgcttcttccctcaaaaggcaaaatattctcctgaagtctgtcctttgagaatgaaccttggctgtctttggcgtcattgcttcctatgtgaccctttgctcttgtgtctgtctctgccattgctagggatgagtgggtggggcagtgtagctcagcctaaacagttcttttccaagacccccactcaggtgaagtgggcattcatgactgcatcacagaaaaagttctgactgagtcgggatgaagcagaggtgaagtctaagaagagatttttacatcatatgtgcacgcacacacatacacacacatgtgcacccaaacaagagtaaaagaaaggtgcttaggggaaacttaagacacatacaggtgtggtgtgggcttttcaagggcaaattttccctaaaggtctgtatagtagtcatctataccattttggtggcttcgatagtttgaaacgttgaaatattgctgagaaacttaaatgagttgatagagtgatttctgacatgcattatataggattacagttgataaagaccatgggtcagagtattgtgcaagaagtaaagatgatttagtgtagcaggcatgtcctgcatacagctgagggtcgctgtgaatctgcctcaacataaggaaaacatacctaaaacatgatgagattttgatttggtttggtttggttttgaatcctagctttcccgagctcacctggaactcactgagtagctaaagatggccttgaacttccgatcctcatgcttctacctccagtactagaattacatgcatgcaccaccataccgtgtttaacattatgagggtttgttgttggtttttgtaattcacttgtgcatttcttttttttttaatctaattttttattaggtattttcttcatttacatttcaaatgctatcccaaaagtcccccataccccccccctcactcccctatctacccactcccacttcttggccctggtgttcccctgtactggggcatataaagtttgcaagaccaaggggcctctctttccaatgatggccaactaggccatcttctgctacatatgcagctagagacacgagctctggggggtactggttagttcatattgttgttccacctatagggttgcagacccctttagctccttgggtactttctctagctcctccattgggggccctgtgttccatccagtagctgactgtgaacatccacttctgtgtttgctaggcaccggcatagtctcacaagagacagctatatcagggtccttttagcaaaatcttgctggtgtatgcaatggtgtcagcgtttggaagctgattatgggatggatccccgggtgtggcagtctctagatggtccatcctttcgtctcagctccaaattttgtctctgtaactccttccatgggtgtttcattcccaattctaagaaggggcaaagtgtccacactttggtcttcgttcttcttgagtttcatgtgttttgcaaattgtatcttgtatcttgagtattctaagtttctgggctaatatccacttatcagtgagtacatattgtgtgagttcttttgtgattggtttacctcactcaggatgataccctccaggtccaaccatttgcctaggaatttcataaattcattgtttttagtagctgagtagtactccattgtgtaaatgtaccacattttctgtatccattcctctgttgaggggcatctgggttctttccagcttctggctattataaataaggctgctatgaacatagtggagcatgtgtccttcttaccagtcacttatgcatttcttgagtgtgaactttgaagataacatcacaatgttgcagttaaatggttagacatgcttgtgagtataaatgaaagttgatacttttgtttgtgagttcccagaatttctgataaagaaaaaggataaggtcatattatatagttaggtcttaagtatggtccaaaactattttaactcttcttatttgaaaatattcatatattaaaggaatattgtctttatgtaggccatcttcacaggaaatgttaattgtgttggtattatttctttttaattattttaactgaactgtgtgcttgtttgtagtatgaatatttgccggtcccgtatgtttacatattgaatccagagggtaacatcaggtcttttccttcattactttctagttcttttttttcttcgtcttcttctgaagctccttccctgattccctctaaacttcctgtctctctgtcctgcctcaccacttcacttctgtgagggtcccaaggcctgatatgccaggtgcttggcacctccagaacttctcagtcaaataaacctccttaagcctttataaaacgtgcttgcttcatctatttccttgtagtaatgaaaatgaactggaacatacggaattttttcaaaaaaaatatatatgtgtatgtatgtagatatatgtatatgtatatatttatatttgcttttttgagacagagattttctatgttgacctctagctgtcgttgaatacattacgtagaccagtctgaccctgaactcacagagatttgcctgcctttgtttcccaaatgctggagtcaatactctttgttgttattgtttctttaattttaaaaaataagtatttttatttgtgtgtgtatatatatgtgtgagtgtgaacgtgctttcacaacatggtatgtatggggagatcagtagataactatgtcagatctcttattctacagtgtgtgtttctgctcatcatgttgcccaggctggccccctgactccaggctcttgtagttttcttgcctggcaatcctgagtaactggaattaaaggaacagtgaccttgccctaattactagttcgaacaaaattggttaggctcttgttttgactagggatagataatactaaggtcaaagtgcccgggactgccagttatatgtgtatctaacagaactttctgcagtgagggaaatgttctatatatttgcactatccgttaatacactagtagctacattttgaacacagtcttagttaggatttccattgctgggaagagacaccatgaccaaggcatctcttaaaaagggaaacatttaattagggctgccttacagttcagccccttatcatcatggtggaaagcatggtggaaagaataaaaggatgtgctgatttgagatggacaacaagaagtgaactactgagagagataagtggacattttgtgcaggcagacgtgatgctggaggagccaagagttctatattttggtcagaatgctgccaggaggaggctctttccacactgggtgtagcttaagcttaaagcccacccctacagtgacagacatacttcctctaataaggccacacctcctttaataaagcctcactgtccgtggccaagcatattcaagtaccacaaacacctggcacaaaaaagtgaagcttaaaaaaatgtattgatatttatgtatatgtgtgtatgcccaagggcatgtacatacaccatgtgaatgcaagggcccacagagatcagaagagtcattaggtcccctggaactgaagttacagatagctgtgtcctgccatgtggtgactgggaaacaaacccaagttctctacaaggacagtcagtgctttcaaaccactaagccatctgaaagtgaatcctaagtttaaattttaacctattcaaatattcaggttggtttggaacttactccatagcctcagcaggccttggactcatggcagtctgccctcctcagcctcctgagtgctaggattacaggtatgagcgaccatgttcatatataaggaaagaatcactttcttctttgtgttgttttgttttgagataggactttatgcagcccagcttggcctcaaacacataatgtagcctaggatgatcttgaactcccagttgtcctgcctcgcctcgccagtgctgagagtacagtgtttactaccatgtctagctaagagaatctactttctttgctgaatattggtgctttaacaaggttaagagaataaaaggatgtgctgatttgagatggacaacgagaagtgaactactgagagagttaatggatatttagagatatacagtgctgaccaataaacagctgtgaattaaagcttagagaagaatggaaaagcccgggagatcattaaagaatttagtagtcatctatgtggaagtgatagatgccctgcagaagaggagtacacatttttaggaaaacagtgttgtgtccccacctcattgctatgacacacatctgaagtacttcaaagagaagaggagtttgttttggctcatcactctgaaggttttagtttataactgagaaaccagtagtggtgcagtgcggcaccggcatctcagaagctcattcacctcacagttgggaacccaaccttcagggtttggtatttccaaaacccatttaaaggtgtgtcttattaggcccttatctaaaacttgctggcacctcccaacaacattactggctgaccaagattattgtggttgttgttgttgtggtggtggtggtggtggtgggttgttcttgttgctattattattgttgttgttagcattttgtctaagctccaccccacagnnnnnnnnnnnnnnnnnnnngtgcctgactcactataaaagggatgtttgccccctcctctctctcttgctcttgccttcttgatcccactctgtcctcttgccccttcccccccccctttctccccattcacacccccactccctccatgtactcatggccggcttctacttctatactcctcttctttggtcggtctctctctctctctctgtgtgcctttctctgcctctactaccctctcaactcccctccccatgccctgaataaactctattttatactcttatgtggctggtccctcagggggaagggatgcctcagcatgggcccaccaaggcaccactttcccccatacctaactacacattcaccaagcatatcccctctctctttatccttttataaacacaataataataataataataataataataataataataataatataataagaatagttactactattactattattattattattattattattattattattattattattattatagacagggtctctttatgtagccttggctatcctggaactcactatgtagaccagactggcctcagactcacagagatccacctacctctgcctcccaagtgaacatgtgctactatgcccagctagtaccaaagcttaactttgtgcctttgagggaaagtataggtgtgtagatctagactctagcaaacatcaagggtagaaccttggaagatgccctcactaaaaacaggacatagagcaaacaaaggtaatctgtttactatgtgacattgaagtcagtattagctgggtagtggtgcatgcctttaatcctagcacttggaaggaagagacaagtggatctctgagtttcaggccagcctggtgtacagagcaagttctagaacagccaaagctacacggagaaaccctgtctcagaaaagaaatcaataaagaaatatttattcaagcaagtagtttcatggatcctttggtttggtcttacactggttaagattagacattgtaagtgagcaagcacaagctcaagctgactaattgccactcttaatgtggccaactagcaatctgtgagtatcatcctacctataaaatcacaagtctgtcattaaatgtgaatagttagtcatgttactagtatacataacaaattcaaaaaaatcaacatacaaacctagaagagaacaccatctggtgttctctagtcagtagctgaaattaatgatacataaatagatttaaactttttttgtgtgtaggtcttttggctgcacatatgtctgggtaccatgtatatacggtgcccacccacagaaaccagaagagggcatcatattccatggaattagagttagagatagttgtgagccaccatttgggtgctggaaaccaaatctgggtcctctggaagagcagtcagaaccttaatcgtgccagttctctaacgtcaaatagagtttatatataaaagattaagaagaaatcgttgaagaggattcttcaaagcttttaaaagtacaatatgtatatgtgtgtgcatgcgcgtgcacacacacatgtgtatggattctataaagttttatcttttgttcaaaaacatttgaaatctgactcgccatataaacttagttaactgaatcaaacaattaattagttaattaatctgttgggagacagggttgttattctgtgtagccctggctgtcctggaactcactgggtagaccaggttggccttgaacttggggatccttctgcttcttcctcctgagtgttaggattaaaggcttgcatcactattgcttgccaagttttttaaatgaatctttttcatgtgcattggtgtttttgcctgcatgtatctctgtaagggcaccgtatctcctggaactggagttaaagacagttgtgagctgccatgtgggtgctgggacttgaatccatgttttctagaagagtagccagtgttcttaactactaagccatctcctcggccccatcagtgaacttttaaaaaattatttatttgtatgcgtatgtttccatggaggccagaaggagggtgtcagctctcctggagatggagttacatgcagttgtgagctgcccaatatgaatgctggaaactgaacttgggaaccaaacttggtccttagaaagtgcagcaaatgctcctatctatcactgagtcggcctggcccccgtccattgaatgttaatagattgcccaagtacagtaagtaccctcactgctgtactttaaggtataagaatgaaaagattcagagttctataggttgtagtttcaattttttaaaacatgtttacaagacaagttaactcataccctgtatcatatcattgttggcacacgtctgtattttagtgtattatgtgttagcaaaagacaagttcgaataagaagagttatctagtctctttcagtcagtattgattggaatgtcagacaggtagtgtctaagatgctgaggatacagtactaaaagcaaagcacaaaagtcttgccttgttgtcaagaaatacatccaaaaatgtatttggtggctcagtcctttcactgcaacacttaggaggctgtgataggatttctgcatgttgtagtgcagcctgggctacaaaggagcctgtcccaagcaatatacaaggtcagttatatttgaactttaatattatttgaactgtccagctctgggtagagagaagcaagcaaggaagcaagaaacccttttcagagggggattcttccagtgtaggtgatgcgtatgtgataagagacagacagacaccttagttatgttggattgtggaactcactggcagcggaaacatgacatgccagtaagtccagtggagacagggatttaattttgacttttgaatgttttcactactactgtatacccaggctctaaaatagcacttggcttatgatcaatattcagtaaatacatgttgatgaaattgcttgttttagatttacatactcacagatacctgctttaattttttttttttttttacatcttggcagttggaaattttattttcattgccttatttgtaatattattgcaataaaagtgtattaattttggtagctaatcttatggttatctgacattacaaaaagtaaacttggaaatgaactttaaaaggtcatcttttgttaaatttcctgtgttggaaaattgagtaaaatgattaggtatgtaagtaactttaattaatcatttaaaaaaaaggtcaacataatttttgctctcctgaaaaaatggaaaaaggtacttaaccctggatgtaaaaaactaacccaaaacgtttaagactaactgtgggaaagtgggagggcgaagagcacagctaagctgctctttgttgatatcagaaaccagcctgtcattcactttggcgttgaagcatggcctatctcagggggcaggaccaggactcttccctcccacaagggctgggcagtttctgcaagctcagagagctctgagcagtttttcaggagtttctcctccccttttactgggaaattcatggtgcatttgctctgctttcaaaatgcggtaaggtcttctgctttctgactgactgccttggagccagcagatagtcggacatgtacaattcgaattatgcaggtcttgtgagtaagttaattttatttttaaactacttaaaattcagatggcatttagaaaagtgatagcttggatttaggcattttatcattttttttacctttaagctttttttttttttttttttttttttttttaaaattttaaacagcctttgtaatttagtaagaaagccaggttccatacagcaaagctcctttcttagcacctgtgttttgaggttttgggatgtgcctttctttcttgggcagcagcacacatcttgaccgcttttcttgagcatcttttagttttattgagtattttaagttgagcttgtctgagctcgattgcttacgtctgacacagtctcaagtttccagtgaatggtaacaaagactgtagagtgttgttggtactgcagtgagaggcatgcttccttagaccaggtaagagaggccagtttgtttctcatagcctcgtgagtttttactgtgtttttatttgttaagctgctgccaggctaaatagaaaagtagccaggaacatgctgatttcaagacgtccttgctggttacagatagaaaaactacagagcatgggggggaaggtggggggaggggtagttatcctagtttatcctcagctatttatataaattaattacaatgcagagataattctgggattcagttttttctatttaggagttaaagaagcagttgaagacatcagtcattttagaggtacttcatagttattcctcgtggaaacaattctagtggtagtttttactttcatttttttccaataaataaaataaggtttcctcttattaaatattttcccatttatgaaaactttcaaattgtcaacaataaagtatgcttcctcagaatctttagaaatcaacctgacagacgaaaaaaattcagcctttgtagttatttcgttccttttttcccctagtacaattttcttcaaagtatttgtgctttgaaaatgtcagctgtattctaatgaagctccggcattgtttgctcataaaggagccggtgcattccactgcttgacggtttattatgaggcgccgtgggagagggggtggcaccatttggtgtctgcctcttggggtggtgactgccattatgttagctttggattggcaaagaaaatatagcatgcaagaagctatacagactctggatactgtgaagaaaatcctgttcctaaacaatttttagccgcgaatgtgtaacagcttgattgagctgatcatttcaagtatacccttgaagtctatattatggttacaattcatattctgtgaagcacatatcttgtttttttaaacattattctttttgctttaataaggaaataaataattttttagctgtaacattttaatggctatgacaatattttaagtaaagaagtctaaggaactctgtggggagggagggggagttggagaggggcagagccttcctttcagtgaggaaagccctgatgaggaaaatgaagcaacagatgtttcttctgttacaattgaagttgtttcattcaaaattcaacagtagctgaaatgaggagagagagggggtcataaatccgacctaaatggtgaataaataaaacagccatttatcatttatttaaaattcatcctttatagtcaggatttgagaatcaacataacaaaaatgagtatacatttttgttaaagagttttttaaaaggaaaccttaaaagttgtgtaatgaaaacagttttagtgcatttaagttataggaaatagaacattatattagatttaactcttaaaaccaaaagtcaaataaaatatatagaaaatgcttagttgcagaagtttgtaattgcaaaaaggcttcgaatggagtagagaaccccagttgtgcatgttgataggccatttctacaggaaacatgagacctacaccagagactctctggatgaaaaatatgggagacatgtttggataattgaagtgatatgtttcactttgtctgaaaaaaatcataagcttaggttggttgctcatggaaaaaagggtgatgtttatttgctggaaagagcaggaaggaagataatatgaacataatgaaagcagtcgtatactttttaaaagtaaatcagattcattatgaataaagtataaacaagtaacacaaaggggaattctgtgttcttatataattttcacttatacatattatagctactctttttggggcggggggacctatatggtcttatatgtagctcagtctgttagaactttggaggtgggggtgggggtggaggcaggtacaaggttgcactatgtagctctgactggcttggaactcagctcgacctccctctgcctctctcatgctggttttaaagacctgctagttttaaaggtgtaagccaccatgctgggcctggcctagaactcttggtcctcctgcttccgtccccagagtgctaagataatagaaatatgccaccactcccatctaactttatgggggtcttttagccttggaagtatttagtgactgaacctagacatgaatgctaccctgagctgtatccgcttggcctttatatttttcttaaagtttatactgggctggagagatggctcagcagttaagcgctctaactgctcctccagaggccctgagttcaatccccagcaaccacatggtgactgtaatgagatctgatgccctcttctggtgtgtctgaagacagctacagtgtactcatatacattaaataaataattaaaaagattttttttactattattaatgggatgggccatgaatgccatagcatatgtttggagtcagctctcttcccccaactttattggctcctggaccctgagatagaactcagatcatcagccttgaggaaaaaacactgtacccactaggctatgcatatcttgggcctccttatatttttcttaaagttagcctttttgtttatttgtttaattttagattggattttagtttttaattttttgagacagggtttctatataaccctggttgttctgaaacttactgtataggccaggctggccttgaactcacagagatccacctgcctctgcttcctgagtgttgggattaaagtatgtgccacgacaccaggcaaagttgacttttgaaaactggtgctaaagcaccagatctttaaaaaaaaatttatatgtataggtgttttgcccaaatacatttctgttcaccacttggcattcctggtgctcatggagaccagaagggggcatcagatccctgaattctggaagagcagatagtacgcctaaccgctacgccacctctccagcgccagcaccaccaggtcttttatgctaaacatttattattttccaaatcttactctgtaacgttagtagtaatatttagttgccagaacatctttagctacactttgaattttatgcattggtcaaatattatgtagcttctaaatatttaattggcctaagaagactggaaataacttcaacaataaaggaaaatattaaaaaaattttcttgtttttagctaggatctgtaggtttccttgaaggtattcttcaaataaggatgacagactttagaggctttgaagtttatcaactgattgctctaattaagataaaattctaagattgatttacatactctttaaaggaataacaacagcaatcttgatcaaagaatataaatttcagtgaacaaataacctttaaaaaaagtgcttggcctcatgtagaatatataactgtaatagcatttttcatgtacttatatttgagtaaagtatattttaagtaaagtatacattaagtatatttaaatatacttaaatactttttaatttacttataagataggctcttttgaagttgaggctggcctcaaactgtgtatgtaagtacaaccttgaacccctccactgcaggtatcagtgtcgattttgtagtgcagacaggatgccaggtcctgcagtaggaaagcagcagcagcggtgcagaagtcattggaacgtcaacatttcatgtgaagtctaccacataggtagtagaaagcacatcagctgaattatcttaagatgaacacctgctatctctgtaggagtgaattatacaatcattgtgtgttgtacatataatgtgtgtgcatgtatgatatgtatacatgacaccatatatatgatgtacagagaaccttgtggacgcgttctctttttctaccttcatgtgtgttcctgggtctgaactcagcttgtcaggcttgtgtgccaaatgtttttgcatgctgagccatcctgctggcctacatttatttatatttataatatataggatatatgtgtagatatatatcccccatatatctatctctacatctatataccctatatctatataattgtatatatatacagagtatatctacatataccctatataaaaaacagtttctattacactatagagttatatcctttcatttacttataagacaggctcttttatagttgaggctggccacaaactatatagttaaatacaaccttaaacatctaatactaactgcttccttgttagggttgagattacaggccactactctcagttttatgtggtccagatgtggaacccaggatttcatgcttgttaaacaagcaccatacagcagtttgcttattgagacaaggtcttcttctataacccaggctgactcacgatgtagctccgaaataatttctttatacacatatattccttaattcatattcattcatattctctttccatctctatatatctagtagtctagaatggcctcagacttactatatagttgaagatggccttgaacttctgatccttatatgttcatctcccagatgctggggtaataattgagctctactacattcagcttgtaaatagaaaactttacttttttaaggcaaggtctcgattaataaccttgccagcaccaccaccccccaacaaatgaataaagagttcaggctggcttctgacttgccactgtcctcctgtttcagcctccagagtagtaggattgagatataggcatatgtcatcatcctttaatttccaataagctctaccacagttagtatactgttcaaaacatgtgatgatagaagactttaggaataagatgtgcttgtggctttgtcttcattgtgaactcttcatcataaaactaatatcttagagaagccatgtttacctatttattatttctgaagtcagaaatagtatcctcagagaccaattgatgtagttattctcactatcttacataggcatatacaacttggaataattgatgactgcctatgaattcctcattggtgggataggggtaagagggaaatttttcatgctgtttatgtttcttattcaaataaaccttttacattattgttcaggaatacatagatactatatttcaggtagctttttttttaaatgcatacatggacactctgtgtgtgtctatgtttgtgtgtgtgtctgtctgtgtgtgtgtttgtatatacataatcatgttacataacccatgctggcctttaaagttcctacaacccttctgccttggttttccaagtgctgggattacagatatttgcagccgtgctggtgaggacggacccaggagcttattgtatagtaacactgttttctaccaacagattttcaagtgaatttttaggtgacagctctaaacatggaatctaacaacacagtactttggttttggtaaattactcacatgtggtgaaaatctggcagatttttgatgctacaaaacccacggacttggagtactttctgtgtgctagtaagaggggcactttttttaaaaaattattattattattattattttgtttgtttttgtttttcgaggcagggtttctctgtgtagccctggctgtcctggaactcactttgtagaccaggctagccttgaactcagaaatcctcagaggcacgcctctgcctcccaagtgctgggattaaaggcgtgcgccaccactgtccagctaaaaaaaagttttttaatgtatgcgagtacactgtcactgtcttcagacacaccagaagaggacatctgatcctgtatagatggttgtgagccgccaagtagttgctgggaattgaactaaggacattcagaagagcaggcagtgctcttaaccactgagccattctccagcccgagaaccttttttcttaatgttttattagtgtatattaattatacataatggatttcattataacatttttacacatgtacataatatatcttgatcataattatctcttgcctccaacttacctttgtatctccattgctaattctaatccctttcctcttccctacttacctgccttctacacacccacctcagtttgtctgcgtgacccagtaggtttccttagggttgtctacagaaacataaatgagggtttgtttacaggaaacatgtgcaccttacaaagtggctgtattgctggaaaaaaattctttttttttttaaagatttatttatttattatatgtaagtacactgtagctgtcttcagacatctatatttattatatgtaagtacactgtagctgtcttcagacactccagaagagggcgtcagatcttgttacagatggttgtgagccaccatgtggttgctgggatttgaactccagacctttggaagagcagtcgggtgctcttacccactgaaccatctcaccagccctggaaaaaagttcttgttctactatcaaccattaagtgtgtataaatcttcagggaaagataagagagatagaacttttaaaaagattttatatatatgggtgctttgtctacacaccagaagagggcattagatcctgttttaggtggttgtgggtgctaggaattgaactaagaatctctgaaaagacagtcagtgctcttaaccactgagccatctctccagtctcagagacagaatttataatgaaagtatgcaactgagtttggcctggaacttgctatatcctcaaggctggtctcaaacgcatgatcctgcctcagccttctaattactagggttacagatagattatggaaatgtgacagcctaccgagaatatcatttaatgcagatgtgggttctctcccccttaatatgttaaaatgaatctatagccttgtataatctagtcaagaactctgaccattgagatacatcctttttcacttaaaaaaaaggttgtgtttgtttgtttgtttgtttgtttgtttgtttgagctggatgtggtggtgcacacctttaatcccagcacttgggaggcataagcaggtggatctctgtgagttcaaggctagcctggtctccatacgaagttccaggactacataatagaccttgtctcaaacaaaacaaaaaagtatttttaaacatttgtcttgtatgtttctgtctgtacatgagcatactatgcacatgtgtggaggtcagagaaaaatgtgtttccatggatcaaaatggggttggcgggtatttcagtccatcaaagcatcttgctggcctcttaccttttaaggaaggacctcagtaagtgcttaggcagacctgcaaacgtcaatcctttggactcagagtctctagtagctaggattgcaggcctttcacgaggcctgggtatgaataagtttttgtacacaataaattttgttgatgttgatctataacaataagatttcttgctttttgtagtcttctaaaaatacaggactggcagaaaggctctgtgggtaaaggtgtttgccacccagcccagcctgatgagttttgctttctagaacccatgtggtggaaggagagaaacaactgcaagttgtcgtctgatctccatgcttatagcactcctgcaatgaatgtatgtatgtatgtatgtatgtatgtatgtatgtatgtatggtatgtatgtatgtatgtatgtatgtatgtatgtatgtaaagaactgttgctataggaagcttcaatgatcttcctgtagtgtagatcttcttgtcagtgaggacacaaatagccctcagaagtctgagtgacctacttaggacactatggatcacagtgatcccttttttattttctaaggagaagaaatgcctatgactcctaattcatggataattttattctgttttgaacttatgtcctaaattagaaaatttttagatcccaactttttaatttaagatctatttctaattattctaaacttttataaatagaaaatctcttacttgagtgtaaattaagaacgatttatttgtttatacaatctggatgccatctgagaggaactcataagctttgtgagattaatttccaattaagttttgagcatttttacagccataagttctgatcctgtggtcacacccagccacctccatctcctgcagccactcagtggctgtttgtctgagataaaacgcgctgctttctgttccttctcttcacggggcctaggaacaaagctaacttgccacagaatggttagagatgggatgagcattgagaccctagaacatgtacaaagggattggagacacggattactaagcaagcaccttctcttttataaaagtaaattcagtggggtagaaaaactattattttcttaatttgaaacacagtagttcttcccaatcagttgaagctcttttaaaaacatgaatttctacttagtttttggctcagtaggtgtccagtggatccctgaaatgcattttgaatgagaactcatgtcaccactccctgtgcagtgcacagtgtaaccagacacatagggaaggacagttagaatggactaggtgagccaggctgcaaatgatgtaccaaaataagtattaatcaggctgatggaagagacatggaaaattaagaattaagtatttctaagactgaataagataatagaaaaaagaacaaaatcacgttttgactaagtataaagaatggagtgaagaaggaggtacagcagactactggtgggcgaggcaagtgtttggaggagagtgactttaccatgttaaagcgaggactagacgtgtgcctcgtccttcttaataaacctttgtacgtgtactagtggtttgtaagaatagcatgcaatcagaaatgcaactgttaaggagtctgtgactgtgtgtgagcgtgcctgcacccctatccctgtctgcgtctccatccgtcgacccacgtataatgtgtacttcagattggagaacaaaagtaatcattattactttgacctccttcattttcatactaaaaaaatttaagagaaaaggtttataaagttgactacttccaaagcaatatgtggagaattaaatataaaacaaaacctgtcgagtatggtggctcatcctgtaattccagtgcatggggagctgagacagaactactgggcaccaaggcaaggtgggtctcaaaaaggaaagggaaagacagacctgctggctcacaccttgtaatcccattacttacggggggctgagtgaggcaggagagttgctgggagaacagcctgggctatctatctagttttaggaaagactaaactacgaaatgggatcctgtctcggggaaaaaacaacacacagcaaaaactataaaattggaaaaaacatttgctgcaagcataacaaaataatcttattccttcattatttgaagagatcctacaataagtgactaacaactagtagaaagacaggagaattcttaggaaaaatcattatatagcttttattttgttggttggtttgagttccccatgtagctgagaatggccttgaatgcctgattgccgagattacagtgcactttcagatacacacacacacacacacacacacacactctcacacacactcacactcacacacacacacactctcacacacactcacacacacacacacacacacactcacacacacacacacacacactcacacacactcacacacacacacacacacacacacacacacaaacacacagtggtaaaaagtgtagaagttaggacttgtaagaatctgttctactgttttcctcaggggaaacctggctgtatgtgcttttatttgctaagtcgtcttgctagttcatcctttgtattaccttaaatttatttattgattgattgattgattgacaaaaatctcactttgtatcccattttgacctgaaattcactatgtagcaaatactggagttgaaattatttcaactcgagtgctgagattataaacttctatgcccagccttttttgtattcttccttccttgtggttgttgtaaataataggttatatctacttaaaatatatgcatgcatgcatgtgtggcacacgtaggccagaagacatccacttctctggcgaatggtttgaacatatagacacgttgtttagtgcgcagtgaagcaagtgcctagcctctgagaaccgcttgaaatggtgggaatgggcatggacataacaagaaggagcgagagctgcagatggtacagtctttatataagaacttaaggcttttttttttctgtttcaaatgtcattttattgcaaaatggtataactaattacaggtttaaactataacttggtaattttagtcaggcagcaagtggctacaaattgcttatttaaatgtgatcactatgtaactctggtcttattggccaatagggctaagccactaacaatttagtggctcgttcatttcttaggaaaggtatactgtaattttaatagacagcaatacaggaagagttcttaacaagttctcacttaagttaactctctctggctgtctcaattgaggtagacacattcacataactggctgcacttgagcctctgcaggtagctttagctcttcagtgcacttggcaatggtctccttttcctgctgtgtagaaatgctctgcaccacatgcttttccaccagcctatcatatgctcttgctccttgtacagaaatatggtagtccaggcgattcttttacctccttatatgctcatctagctgtgcctggcaagagacctccacagacaggacagtgttattcctctgaacatagtctgctttcttatacaaccgagctccacccatgggctggttccattagcatttgtaattaatcaagaaaatgctctagaggcttgcttacaggccagtcttatggaagcattttctcagttgagattcctgttctcagattctctaattgtgtcaagttgacaaactaaccaggacttggatctaaattcagcaatttaatccagaggaacatcagactcgagtgtatttaaaggcatgaggctgagatcagtttatccaataaggaaaggttgataagtggggttggagaactgaagcctagggcttcagaacagttcagagaggaacgccagccatcaacaactggaatagccagttggctaggagaagactaagaggcttgacccaattgccaaatgagaaacaacgtttcacaggatgtagtaaaatcatgtacaatgctgagaggttaacttgagttgaaagttaagacttaatcttggattcagcaacatggagatattgataagaactatttaagtgaaattttaaagaggaaaatgggaaggggttcaagagaatcagcaatggaggaagtggacactgtaaatgtccatagattttgagagtagtttgactgtggaggtcaagaggaatgggttggtagctgtagctcttagcattaagtggcagaaagtaccttcgtgggccttgcaatcgatctaacacaagaggtttattggggggagagggacaaaggggacataagagagatacagacagaattgggagggggcatgatgtcaacagggtccttttaaaggtgtgcaagttgcctaggaaaatatgaaactcacaggacagtggaaggaggtgccccaaacctggctgtgatggtgatgatgtaagctgctggcactgagtcacattatgcgtggctaagaaaagttggatttttttgttttgtttgctttcaagatagaagaaataatgtatgtttgtgtgctgagatcgatccagtaaagtgaaagattgttctgattcaggagacctttaaagggactagagtaacatggtgtagacaagtaaataaattagctggcttaaaaataatagagctggttgacaagtaaataaattagctggcttaaaaataatagagctggttgaagtaacagataaggaaaagctaagagaaatgcatgacctatattacactttttactaataaacataaatttgcttataccattttccctttaagtcaggtcttcctatagaccaggttggtcacaaacttgctttgtagctcaagatgtccttgaactcttagtcctgctgccctcaggaagtgggactatagccatgggtctctacacctggctttctccttcattttggtatataaaagtataatttacagtccagtcagatggctgatgggtgaaggtacttaacgcataagccaggcatccaggagcccgtatagaagtgataggaaagaacggattacacaaagctgtctctgagaactccacacaggtgccatgatgtgcactcaacaccccactaattattattaataaataaatttttaaaatatataattaagccgggtgtggtggcgcacgcctttaatcccagcactcgggaggcagaggcaggaggatttctgagttcgaggccggcctggtctacagagtgagttccaggacagccagggctatacagagaaaccctgtctcaaaaaaccaaaaaaaaaaaataataataatttatatgtatatatatatatatatatacatatatacatatacatatatatataaatttaatgtacaagagaattagcccttcttagattggacttttagttccacaaacaccataatgttggtcccactttgtttgtggcatggtcttactgtttagttatggccactatagaactcataactcacagcaatcattccccttagcctcaagggtgttgacattacaggtgtggactctgggccaacaagttatcaccttaaactgtgtttgtttgtttgtttgtttgtttgtttgtttgttgagacagagtctctctgtatactcatggaactcattatgtaaatcaggctggtcttgaactcagagatctacctgcctctgccccccagatgctggcattaaaggtgtgcgtcaccccacccagccaatttatacttattattaagaactgtaggttggtttagactgggaaaccgaaacctctgcgtgcagattttttcatatttatggagattttatttcctttatttgagaaacttttttctctttcttttctttttctttttcttttttttgggggggtgttttttcgttttttgttttgttttgtttttcgagacagggtttctctgtgtagccctggctgtcctggaactcactctgtagaccaggcttgcctcgaactcaaatccacctgcctctgcctcccaaatgctgggattacaggcgtgcgccaccactgcccagctttatttgagaaacttaagtcttgggtcaatcaaaaccaatttctgggatgcggggacaaaaactgaagtttaattaagctagtaacttgtacactattctatagaggaacctctactctaaatgtcatcttaccctggaaacttgtgccgagcttctgtggtcaggtgttggacaggcctctgggcatctcataaaacttctctacttgcagctttacagtcaatgaacgaggctgcccttactgtgttttagaacctagcttagtctcttgcataaaattctaaaaacgcatcagcccacaattaaaaaaaaaaaaaaagttgttatctgggccacaacagaacccagagaatttatataattgaaaaattataggtgcttcataattgaccttctgatccaaaatgacctattgaatttgcaacttggttcttggtgtggaggtccacagacaaactcggacgtcttcagaccttagctggatgccatgaggcgttatttggctttcgactctttttttcttgtctaagaggtagcagcagcaacagtgcccacctccgggcagcttctttcttggcatgatgagcctgcatgcagatttttttaaaattacatttatgcgtgcgtgtgcacatgtttatatatgcactcattttccttttaccatgccagtcctgggggtcaaatttaggtccttagatttagcaacaagtaccttaattcactgagccatcttgcctccaattctagatccttccactgtaatgtcctataggaggattacaggaatacactgccatgtacatcatcaatattgagaaaataaagatataatttaggctgtttgataggaagtttggcatccagttagaaaacttagggaatccagtctgggctgataaggtttgtatgtatttcaattaagactttttggtttttgtttattttgtttggtttttccagatagggtttctctgtatccctggctatactggaactcattctatagactagactggtctcaaactcagagacctacctgcctctgcctcctcagtgctgggattaaaagtgtgctctactaccccaggtatactgtgtctccaaatgtagattagtagaatggaataggaccgcgcgcgcgcgcgcgcgcgtgtgtgtgtgtgtgtgtgtgtgtgtgtgtgtgtgtgtgtgtgcacttgataccgcaaaagactgacttcttacttacctgtctttcaggtaacatttcacttgttgcctttccagtttcaagcaccaactcaccaacaaagattttaccgaaaaccttagggccaataaatgtgaatgttggaccccaaatggtaagaaaattattaaatttcagaattgacacttttctcaggcaagactaatttatagataattatgctgaagatgtttgatcaaatattctatttaattttagttatctcatttaccctaaataaaagttttggttttatctcagtataattaagtattaatttatattaataaatgtttttgtgttcttatgtttaattttaacatttcaatctgtgggttctgaatgtgtaatattaaggtttttctccccttacgaggcctttcttaacttttgttgtttaattaacttgaaatctattgtattctaccagtcttacaacttttgtggaaaccatgtgtgcacatataaattgagttataactgagtagttgaatttatacttggagttatagatttcaggtttttcattaaattaaatgattaaagattattataggtaaactcatgcgtgtactcacattttgggaggcagaggctggaggatcaccacaagttccaggataaccagtctatttagtgagttccaatccagagaattacatagcgaaaccctgactggagagagaggcatggggtagagacggggagagaacagggagaaaggaacttgcgtgcttacaaataaccaaggaagcaactgtgtgccattttaattctcaaccctaaaattactggatgaaaaataagtatgtgtatgtttctttaaaagcattattcctgctagagcttgaaatacgtagtcctctcagaaaaccttgtttataattacatttgcattagattactctgaccaaccaagtgtagtggcacgtgcctataatcctagcacttgggagacagaggcaatcggatctctgtaaattccaggccagtctagtctacaaagcaagttcaagaacagccaggactagtacaaagagaaaccatgtctccaaaaatcaaaacaaaacaaaacaaaatcactctgctcaggtttgatggttcttgcctgtaagccctgctcttaggaaactaagcaggaggatcttagtgcatttgaagccaggaggactctctcaaaacacctactacaggggactaaagagatggctcagtccttaagagcactgactactgcagagggactgacttgatttccagcccctatttctgaggctcacaactgtctgatagtcaggggatccaacaccctcttctggcctccatggcatcaggcatgtaagtggtgcacagatgtacatgcaggcaagatacccatacatagaaaatacctaccgttaaaaacaaacagactaacaaaaaaagtaaaatatcttaaatcttaatatttttattttaaattatttatttactgcatgtatacatgtgcacttaaacacatgccacaacatacaacatgtgtagaggtcagataacttgcaggaataggttctgtccttccactgtgttttttccaggaatcagaactcacgttgtcgggcttggtgacagtgccttcccagtgaatcatttcaaatacgtaaatattaaagagtaattctcacttacagaacagtaccaatatattttgcttatgacacagcattctgtggactattttgaattcaaagtttaaatagaactatcttttaacattcttactggtttcaggaagtctttaaggtattataagcatgacatttcctagggtcagttaaagactgttaatcatctgaaactttcaagttaaagataaaacacagtttactgtaagtatgtgaagaatgtgatctagctctagaccccatagagactcagataaattgtccccacttggaagtagctcaggaaagattcaaacagtggttcagcatgtgcccttctctcagccactacagtagatacagataagacatttagctaaagtctgtactttgaaatagaattatgtaaatactaaaattccttagtcatcacctgtgtggctctaaggtgccttgtacagtgcaggcatggtagtcactccttcagagggtacagatggcaccaccttggtagcagtatccatgcgccatctccactaggctacagaatgctgatgccacttagattttaaagaacctttgagggagcctcgaggactaggtagagaactattgctatcgccactgaaaagagacctcattagaatgctgaggggaagctatggaaatggggccaccctcaaactaattgccaccagcaataaacagggccaccaccttagcaacttgaatacttcccttggaattttaaggactttactggggttaaacctgaatttatagtttctaaactgaaaagaattttaggcctaattagtgtataaagcagaattggagattttattatagatactgtattttgatagaattttatttgaatgggtatttttcttgtgtgtgtatctgtgcatcatgtgcaagcagtacccatgatggtcagaagaaggcatgagttctccagaaatgatgttaacaggctgttgtgagtaactatgcaggtgctgggaatccactcgtagtaagtgctcttaaccatgagtcttccctccagccgcactattaaagatattctatgacaggtttgaacatcagggttaggagggagatgcgcagaatcaagtaaggcacattggagagtatgctatagggtgctctgtgagtagcagctcacagtagttagatgaagcatttttgtgggatttgaagttagtttgttataactgggtggctcctgaggggcacctgatagttgataagataaaatcctagcccacaaaaaaaaaaaaaaaaaaaaagccgggttttgtggtgcacgccttcaatcccagcagaggcaggtggttttctgagttctacagagaaaccctgtctcaaaaaaccaaaaccaaaacaaacaaacaaacaaaatcctagcccacagcaatgcaggaaacaatttctttgaggttctcaggcaaagtctggggaatgggatgggggcctacccaaggccatacacatttaagctttaggcctagtttattgttaccttaagataaaattgactacatgaagaaattatttctgtgttcgtaaccttcatagcaaatgctgatgagctagagttcttactttcttacttttcatttggcaggagactttaatcctgggtggtagctactcatgtcccccaaatttccctgtctttcctgcctcagaggtgtagagaaaaagcattctacagtatagatcctacagccccatggggagatggtgtaggctgggaccttacagacatcaaatccctcaggagcaaattggtaaaggcagttaactctgatttaatgctgatttcagcaagctgtgtagtgcctctgccttattacagaagcagccgctggaggctctggggtttatctctagctgtgcagcagtgtacctggtcaaggcagtatcagaaatgtgtgtatccacttctaagctgctttgtttgttttccttctttgattacatttaatccaaggtctctggctccaaggagttggcagtgttgagggaagttgtgagttctggtacccagaagtcaagcttagcacaatttatatcctccacattgcctttggctagagctatatggggctgtaacagtgaaggtatgcaaggagaggttctacaggtgtacgggtatattatcgcaggacatagaacaggacacagaaaaaccctgtttaaaaaggggtgggaattttttcatcttcttaacttatcttcaggctaatgagcttttctaaagaatggtctcctggccaggtgactggacagatccagttggaataatgtagtttatttaaaacattgttatcttttatgtgtgtggctgttttgcctgtatatatgtctctaccatctgtgtacagcactcagggaggtaagaagttgtcagatcccctgaaactatagttatagttgtgagagctgtcacgtgggtgttgaaaattgaaccctaggtcccctgatagagcacccagtgctcttcatcaatactccttctttctagcccccagttgcagtaacacgtaaggttgggggcaacaatatataatgatctgagcagcatttttttttttattcaggatgaaatagaagtcattgtgtagtttttgttgttgttgttgtttgaccaaaaaaatttgtagctttcctttaatgggctgaaccatgataatctcttgtatattttttgttatgatattttaaatctttatttatttatttatcttatatatgagtacactatagctgtcttaagacacattagaagaggacattggatcccattacagatagttgtgagccaccatgtggttgctgggaattgaactcaagacctctggaagagcagtcagtgctcttaaccactgagccatctctccagctcaatatcttaaaatcttacggagagatttccttggtagtgtttccagggaagtagtaggtggggttcaaagttgatgatgagacaggggtctatgttcagtgacctccaaacctgcctgccatatgtgtctagctacttcacaggaaccccaagcccttcaaaaaaatcttagaagcagagacccaggcttttccagtcattgaatatgctgggactttgatgtaaaacttctcatcactaagactgttttctggatacgtggctccttgcaggttggaaatgagacacagactagttctgaagtaaaggaagagtaaacatttattgcagaagagaagtgcagtagcactgccccagaagtagagtagcagtgagaagagaaaacacaggaggggggtgtccctttcagggacagagtaacaaaggtggatagatgttttgtgggagttaaaatagtcatgtcttttttttttttttttttttttgaattctcgtggtgttggaagagctataaaaatgtagtgtgtgtgtactgtttttgaatattgctcaaaatatgcatgtgtttgttctttttgtttgttttttgttttgtttttgagacagagtctatgtagccctggctgtcttggaactcacttagtagaccaagctggccttgaactcagaaatctgcctgcctctgcctcccaagtgctgggattaaaggggagcaccatgacctccctgtatgtgcctgtatttgtgttccagnnnnnnnnnnnnnnnnnnnnnnnnnnnnnnnnnnnnnnnnnnnnnnnnnnnnnnnnnnnnnnnnnnnnnnnnnnnnnnnnnnnnnnnnnnnnnnnnnnnnnnnnnnnnnnnnnnnnnnnnnnnnnnnnnnnnnnnnnnnnnnnnnnnnnnnnnnnnnnnnnnnnnnnnnnnnnnnnnnnnnnnnnnnnnnnnnnnnnnnnnnnnnnnnnnnnnnnnnnnnnnntccttattttttattaattatctagtcaggaagtattgttacatagcctgaatagcactaacacatttacgtctccctttcttcattactctttttttccttccttactaagtagccaaagctggccttgaacttggaaccctcctgctttaacatcccaagtactagggttacagatttttttttctgttttccttgattcctttgtcaccttatttctttatcttaataaagattaatttattttttgggagggggggctggagtgatgactcagtggttaagagcactggttgctcttgcaggagacctgagttcagtgcctagtatctttcttcatggcagcactgaactttctataactctagttctaggggatcagaagtctcttctggacttcacgggcacccggaatgaagtggtgcaggccatatatacaagcaaaacatccattagataagcaaacgagacaggtctcatggagccctggctgatctagagatgtctagaccaggcttccctcaaactcagagattcacctgggagtaaaggcatgttccacaaacctggcttgttactctggtttttgtaacacaccctcccttcctcccttcctcccccgccaccctacccttgtatatatgtgtgtgtgtgtgtgtacactcaagtgtgcaagtagaggtggtagtactgtgcaggagtcacttctcctaccacgtgggccccagggattgagctctgtgtgtcaggcttggcatcaagcacttttacctgctgagccattttccagctcttcttgctgctttcatctagtctagcctaggggtgtagatcagtgataaaatacttattttagatgcactagtcttgagttcattccccagaacttggggggttgggggaagcaaaccaaaataaaaaacaacatcgtttttcacctctgacctcatctaggatttttttctaatcgcaaaagcaagaggtttattttcctgtgcatcagggttgaccttcaattagtccctctaattagaaggtgaccctctcatctaggatttttttttcttaaaatttatttattttatgtatatgagtacagctttcactgtcttcagacacaatagaagagggaatcatatcccattacagatggttgtgagccaccatgtggttactgggaattgaactcagaacttctagaagaagttaaccgctgagccatctctccaggccctcatctagggttttaaaaagttcttatttaagtagagaattcttggccagactattacttatcgtccttttttcttttttattgaaagtagatttttttctcacataatatatcctgtttattgttccacctcccagactcatcagcttctttttaaaaaaaaaatctctctctctctctctctctctctctctctctctatctatctatctatctatctatctatctatctaatatgtgcacactgtagctatcttcagacataccaaaagagtgcattgaacggtgagccaccatgtggttgttgggaattgaactcaggacctctggaagaacagtcagtgctcttaaccactgagccatctctccacgcctgactcatcagctccttaaagtcttgtttcttgtgcccttcccttttaaaactcttggaagctagatatttcaaaaaaggtgctcagaaggttgatatacttgctgcccagcctgtgatctaagatccattcctggaacttacatggttgaaaggagagacccaactcctgagagttgtcttctgctgtccatattctgtggcatgcaggcagctcctcccccccaccccgtgtaacagctttggttgacttggaattcactctgtagaccaggctaaccttaaactcaagagattaagtttctgcctgcttctgcctcccgtgtgctgggagcaaaggtgcgcaccatcttgccagatcattaggattttcttagtcagtctatttgaaacaaagagattcaccataattctcagccacaccttctgggggcagcccagataaagaacatgcaatnnnnnnnnnnnnnnnnnnnntcaacccctccccccctttaaaaagtccttatgaaaagaattttcattggttgtaaaaactaatttagatttacttttatttgtgtgtatacatgtgtatctgtgtgagtgtgtgacctacatcatgtggcagtctccttggaggctggaagaggcattggaccactggagtggagttaaagatgttgctgagagcccactttgggtcttctggaagagcagcaagtaactgctgagccatccttcaacctgggaagctagcttagcaatgcttgctttagtatggcttttcactcctggctattttagttcagaagaagagaaactactacacacttagtgaaaacaaaaatgtcacagcaattgaacataatacttgataactatgaaaattccttttccgagtaaatacgttttcagctgttctacccatagatggcagcagtccttcaactgtgttgttggagggatgcttagttgctcttgattcttcctagcctaactaatcagtcgtcctagaaatgacaggcaagattaaagagatctaaggtttggagtatgaagaatagttgattctaaaatttaaaatggcttttccttttcttagctgaatgttagaagtatgtttacacttacatattaatttattttcatatgtgtacatgtctgtccaaataaggtaaaaggcacgtgtggagctcagacaactccaatagtcatttctctcctaccatgtgcgttttcagggattaaactctctcaggtcattaggcttggtggcaagcacctttacccaacatggccttcttgccaatgtagaggtatatataatttttttaatatacatatatatttttattaggtattttcctcctagaggtatatttttaattcttacttaaatttggaacttcaaaattatggttcaaggaggtaaagtatgctttgactcattatctatgtaacttattttctgcactgggggtagattgagtttttctttcgtttttggttttgttatttgttttgtcttggttttgcttgctttgagatgaggtgttgctctgttacccaggctgggagttcctgggctgaagctcttcccctgcctcagccgcctatgcagctggtatcaggggctgcacgtccatgtctaccttttcttttcttctggttttgagacagagtctcagtatgtagactgggctgccttgaactcacagagatccccctgcctgtgcctctagtgttaggattgaatgtgtgtggcagcatacccagcatttgttttgattcttagtaatattgttattatcctagttttaaagaatatgcattttgaatttgcagtacagattcttttctactccattacagaatctaatctacagattcaacctctctggtttgtccactcagaaaatgttaaaatctcaggacatgtgggcagaggcagacaaatctctgtgaattcgagtctagcctgacctgcatagcaaattccagccagagagagagagagggagagggagggagagagagggaagttgggagggaggnnnnnnnnnnnnnnnnnnnngagggagggagagagagagagagagaatgtcaagaaactgctgtgtaaaatgtgacaatttgatattgagaagtaaaataaattttgctaattaatatccagtgttattctcaataaagaaacttgttttttcttatgttttctttctcatcctctttcaaagtcttttatatcagtaacactaagctccaggcttctaataacagaaaataattcttcagtaacaatgctgtacaagtgagacatagagtacttaggatagtcttgtgaagattcctcttgtaggagcagagcagtaaagaagctgatggaatactccagttaattaactaataagctcgtacctaacatgaccataagtttgatggactaactattcacttggatttcttaattaacatgaacagtttataatagcatctttaaaaaactagaacttaatattgcattttgaagcattgcatagatacaacaccttaaacaagagttgaaacatatattcatagtatgttgtaatgaaatatagccttaatctgtatcaatatacaaaatccaaaccaaatgtaaatttttttttttttgagacagggtttctctgtgtagccctggctgtcctggaactcactctgtagaccaggctggcctcgaactcagaaatccacctgcctctgcctccaagtgctgggattaaaggcgtgcgccaccacgcccggctcccaaatgtaaaatatttggttcgttaatattctttggtctaaaagtagattcaacaatctacccctttatcctattatttctaacttctctctctttctctaacactagataggagagagagagacggacagaggaaagaaacagaaatccctgaatctaacctccctgaccaagaccactaataatcctcccactgagtaaccaaatccacccacatcaatttttgggaatgagatgccattctcttaaaattgcttcctgcaatctgggggtgtcagacccttttaggagtctgtataaaactgggacatggccagtctcaagaaagctagctgtaacatttgttgtccagtccctctgtgatgggaaagtgcagggcttaaatgaagtcctgactgtttggctggaagtagcaggatgctggaataaatatgtctcagcatccttctcagcgtccttcagggtgagtcttgtcagggccgctctaacatcactggggtttggttgtttgtctctgtgaacctacaagcttttaactgtaatacacatttttgcatgaatgcatgtttggcatgttaaaggtgattctttgagcaggcaaaagttagtttgaactatataaccaacctgtaatacaaattttcatcgatgccatttgaaggatggcatgtaataattcctgaagattctgtagccaacaagatcagttggctttacagagacactgtcatgtgtcagcctgtctcagaaatgttcccacgtccagaggcagcacaaactttacctgttttattcttcttggtttctcccatcctgctataggctataggcaggatgggaccttcaggaggtctgtcagatctaatctttattatgatggaacccctagcttttcttctgttaaaaccaaggcaaaacctcttctctaacgtaacgtatttcctaccttccattaaagacatccttataatatataggttggtttatttccattaaagacatccttataatatgtaggttggtttatttccattaaagacatccttataatatataggttggtttatttcggcaatttttccccatagcccaatgtctctcagtagctcttgttttttactcctttgaagtatagctaaatcctttcacaattgtccaacttgtaggattatgagatatgccagtaatatattttctgccataatatctaaaatatcgtattctaagaatacatatattaaagtaccatcaacttcagtctgtaaaggatttccaagatagccaccatctctaataaatgtgcagtctcacaatcagcctttttagaattcaaggcagaaacatcgaaatcttgactaccaattgtttgatgtattaaaatatgtacatatattaattctccaaactctataaaatgaaatatataatctattgtatgacattgttctgaacataatctttattcttaactcagcatagtctctttatttaggaatttaataggttggcattctgcaatcttgtcacaaggtggctctgtaggctttggattgggttcctccaaagatcctttttctgagagaattttacaatccgtttattattattgctaacactggcatttaatatttcaatcttttccttttgtaagtttgctttcttttgatttttaaaaaagggatatataaaattgcaattattattgaaaaataattatttgtatgctgataagtgatggggtctagatgcattgtgtcattgtgttttcctctcctctcctctcctctcctctcctctcctctcctctctttttttaaaagatttatttatttattatatgtaagtacactgtagctgttttcagacatgccagaagaagatatcagatcttgttaggatagttgtgagccaccatgtggttgctgggatttgaactcaggaccttcggaagagcagtcagtgctcttaactgctgagctatctctccaggccccatttggctttttcaaggaacttagattttgcatcgtataacaatccagattgtatagtggttttgtatgtatattgagttctgaagatctactttactgttctcctaggtcacataaatcaggctctactacaattgtagactcaatttcaaatgaagcttttgtttccctcttatgggtaccggttggagggtttacttgcttgcttttagtatagtgtctcatttggtggccctaattggcttcaaacttgctaacatcctcctacttctgcctcccaagtactaggattaaaagctgatttgtgtacgggcatgttacatacatgtgtgcttgaaggccaggaacatgcatcagttaccttgctatattctctgctaatttgaatgcatgaggcagggcatctccctgaacttggagcctgcatattttcagctatactagaagcactaacagttcctctctccctaattccctcagaactgggcttacaggtaagtatgcatggtgtgcccagcttattatttgatgggattcaaactcctgaccttacagctacacagcaagcactcttaaccagggtgccatctctccagctcccaaagtgcttaccacgtaggaaaaaagctgttcatttttctgacagtaagaaattgtcagttgtcaggttaatcctcaattgctgatcacttacttgaatctacactgtgacatcatgtcaggagtcagggtactgctgttctaagatgctaagatagaattaaaccaaagatactagtgattgcttagatgatcatcattaagagctcttgacggcacttcttccccacatgttagccaaaagcatcctgtctgtctgtctattatatgggtcttttacctgcatttgtgtctatgcaccatttgtgtacctgatgcctgaagaggccagaagagagcactggacccgtggaattggagtgggtgaattacgggtggttgtgagctgccatcaccacgtgggtacagagaatcaaaaccaggtcttctggaagagcagccagtgctcttaactccatttccagctcccccttcctttttaaaaagttgccttttaaatatatatgcttatttttttgagacagggtctcactatgtagccctagctggcctggaattctatatgtagtagatcagactagcctcaggctcacagaaatcctcctgcctctgcttccccagggctggaattaaaggcttgaatacttaaaattttattttcttgttaccaactttacagattataagcacaccgcagagaattgccaattcaggaagtgttctgattgggaatccatatacccctgcacccgcaatggtcactcagactcacatagctgaggctgctggctgggttcccaggtaagagtgtcagaaattactgtttctaagcctcccacccccttactagcttgctgtcttatcttcttcctactccctctttttacattttacatgtatttattttgtaaatgtgcacacataatacaatggagtctgtgtggaagttagaggagaactttgagagtcagttctctgtccattgtgtgagtcctagagatcaagcttagtttccccatcttgccatcaggtgcctctatctgtcatctcaccacccagagatgtaattatgtatatgtgtgtatgtagggggtggagtatgtgaccaagggtacaggtgccggctgagtctagaaaagagcattggctccctggaactggagttacaggcgcttgtgatccacctaacgctaatgctggaaactagggaactgcggtccctaagaaatctgcatggactcttaacagcagagctgtctctccagaaggttcttttgtttttggtttttgtttttccgagacagggtttctctgtgtagccctggctgtcctggaactcactttatagaccaggctggcctcgaactcagaaatccccctgcctctgcctcccgagtgctgggattaaagacaagtgctaccacgccggcttttttttttttttttttggttttctgaggcagggtttctctgagtagccatgattgtcctggaacgcacactgtagaccaggctggcctcgaacttagaaatccacctgcctatgccacttgagttactgggattaaaggcatgagccaccactgccccgccagaagttcttttttcaaagttttgtgtctgtgtgtgtgatgtatgtgtttatgtttgcatgagcatatgtatttgtgaatatacatgtgtgtgtgtatatacacatatgaaggccagaggttgacatggggtgtctacattgattgtttgccattgtatttactaaggggtagttttttcttgaagtcaacttgctgatttggctaatctacctcaccagtttgccccaataatcccctaacttggactctagagtaaatgctggaattacaggcaggtcaccctaaagacataccttttatgtgtgtgctagggtgtggtccttgggtttgcatggcaagtgtcttatactctgagccttttctccagccctgtgttctcttgttttgttaatctagttctactggttggtttttgggagggggatttatttattttgttttgggaggtcttaagatggtgtcctggtcagactgcctgtaccttctgggattacaggttgctcagaatttggtggtttttgttgtttgagacagagtcttgggatataactctggctaacctggtacatgatacatagtgcaactggcattgaactctcagtgacccttctgcctcagccttttgaacattgagattacagttagttgttctgatacccaactggtttagatctttacaaactaatatattgctttaaaatcgccaatcataatcaggctcagtctgtagcccaagcttgcctgcagcctggagctgcccataggcaggttcctgcatgcccaatgagtacaaccatgtgtgagctgagaaaaacaatttaacttacaactagatctcctgactttaaaattctaaaataggactacttttatgattataatatttagctgctttggagatataaaaatgaattttacattgttttgacacatcaggaaggagttgtgttcagtgttgttttcattcatgagtcttccttcaactttcctaaaattcaggaaagaaactaggaaaagaggacaaatgtattaacattttcatgaaaacctccctcaattttttaaaaataaatataggcaatatttcttttgttaccattttaccaccattactaccaaacccctattcatctttgtttatgaaatgctttctgctagcctttcttctctgtttcctcagcaccccatcttctataaaaggtaattaacaggaaggagtgcattgcagtaatcccagaactgggaagactgaggcaagataaccagagaggcaaaatgagagctcttgggggcagcctgggtcacataggaaaaccttgtctctctcacaggggtggagtttggtggggcagagtggaagcttgcaagaaagaaaagcaaaggtgaagaagaggcgaagtccttaagaacacttgttcttacaaaggcacagagtttggttcctagcacccacatcatatggctcataaccacctaactccgagacatctgacactacatatgcctctgtgggcacccacattcctgtggcttagacacacataaacacatacacacacatacataaaaattaaaagggtgaaaggaaaatattaaagtaatactccaaaccttatttttatcactgttgaagttttattacttgaggagttaaatacttgatgacgtactgctttggttccagcctgtgaatgtggaacaaacaaactgtaaaacccacctcgtttcaaggctacactagctattgcagtaacagccctgtcaagtgcttcatgcttcatgccatatacgcattgacagacgtacattcaattcatatactataaagacaaaacagttttataaaaattaatttgtaaatctctactgtttttctccccaagtattcattgaacttatgccaattttgtattattatattgtcatatctttatctttgtgaaaataagttttcttttgtatacattcagtgtagagtgagacagtttataataaattatttaagaaatagagttgtgtttatgtgttgtgcttaagctatctttttgtctttttagtgatagaaaacgagctagagaatttatagactctgatttttcagaaaggtgagtataagtctgctttgtttcatattccactatggaaagaggggagtttcctttgcaactttaactttatttagtttctaccatcatttcattctacactgagattttcaattctctgatttgcagtttcagtagatagcttgtgacatttgtcatttaggcccctctcttgttttggggaagacagtgttcttccaaagcgagtacactccatagtaccctaacttatccaaacttttaaacagttgttgagactttttttagtttgtttgttttgttttgctttgcttttaaatagttttagatcacagtaaacacttctctagctgcttttcagggtatgaggtcatctttccttagaatatcagtgcatgattctccttcctgattgtgtatcagaagcacataatgtataaatgtctctcaagtcagttacctctggcattaaggactaatcagttaaagagctgggaatatggctcagtagtgcagctctgtatgatgttaattagtcctagttccattctcagcactagcaggaggaaaaagagaagagctattggcttagagcccttgtattagcctaagttcaaaacagcatgctgcccactgtactaggtaccataatagtattacagtgtattaaaatgtgagctgtcatctcagggtccattgacctgataagatgattgttccattaataaagccttgccagtggtttttacaacatccctagctcttagggaattgtaagccagcctgagctagtgtgagaccctttccttaactgaaaaaataaaataatagaatcttattctagcaacaaatagaaatagttaacaaacttactaaaaaatactcatcagcattagtcagtaaaaaaaaaataaaaacaagtgaaaatcacaatgtagtattcattgtatctaccaaatcgctaccaggaaaaagacagtattgatttctgcaagaatatgaagcacctaaagtgctcctgtgctactgaaggcaggacaaattattacaataatttttggaagttggcacatctataaaactaaatatagattgacttattagtgttgtaagtatgtgctgaataggaattcatgcatatacccataaatattaaaagtttccttagatgtatttactgttttgcctacacacacatacacacacacacacacacacacacacacacacacacacacacacacatacacacattctgtgccgagaagacgtcagatttcctggtgctggagtttaacagatggttgtgagctaccaagtagatgctagaaaccaaactgggtcctctgtaagagcagaggacctacctaactatcctagactctctctcacacacactcctacttaatgaaataagggtttggggggactgttttgttggtggttttaaaattttaggttttgtgtgtgtgtgtgtgtgtgtatgtgtgtgtgtgtttgtttctctttgcttttcatttttgagccttccaagtgttagtattacaggtatgtgtcatttgtgtcattgtgcttggtttgtgtgtgtgtgtgtgtgtgtgtgtgtgtgtgtgtgtgcgcgcgcgcgcgtgtgcgcgcacgcgcttgtatgtcacatacatgtgggtgctctcgaaggccagagagagcattggatctcctagagctggagttggggtggctaggggctgcctgatgtggatgctggaaactgctgagtcatctctctagccctaacattttcaaaattacattgattgattggttgattgattgattgattttgtgtttatcagtgttggtgtgcatatgccactaaacaattatgtaagtgagaggacaatttaatggaatcagttattttcctgtttggggtccaggtctaactggggtcattggacttggagacaaacacctttatctattgagccatctcaccagcccctcagagtgtacctactgttacttaagcactcaattcagactttgctatttctctgtttctttctctccatatcaatcagattcttagtttcactactttttgcagttctgtctgtccctcttcccttccactgacccagttccaggtcatccgctcagctgttgtagttggcttcttagctgacttttctttcacctcctattttcccataaatttacctttcactttaacacaagagtttctgcataagtcagtaagtatctcactgtgcaactcaaaaaccacttagtggtttcactgcattttaaaagcagcctgtaagatacagtgcctgtactttgggatccattaatgagtctttcctaattgtattcgttattgttctctaaaggaacagaagtactagaaagaatacacacacacacacactaaaaagcaatttagactggtttatagggtgtggtctgggtagtccagcaatggctgtttcatagtggaaaaagccaagaagcgcatagcaattcagtctgtgagtccctccagtctggagctggagttctggaaggttcctggagagctactggtctttggtgaatgttaaaatcctgaaggaattggatctaaaactattgaaggaatgcttcagccataggacagaggagcttgccagtgagatcaaggacaagcaggcaaaaggcagaatttccgtattgcatgttctttatctgggctgccaccagaaggtgtggctgagaattatggtgaatctctttgtttcaaatagactgactaagaaaatcctaatgatctggcaagatggtgcgcacctttgctcccagcacacgggaggcagaagcaggcagaaacttaatctcttgagtttaaggttagcctggtctacagagtgaattccaagtcaaccaaagctgttacacagaaaaccctgtctcaaaaaaacaaaacaaaaagagggagggaggaaaaatctgaaggcagatgcaactggatctttatgagtttgaggctagccttccccatgtagtgagttccaaactagccggagatacctagtgagaccctgtttgaagaaatacaaattagaaaagaaaactagcagcttgggtttagttaattatagatgtagtcaagttgacaatcacagcaggaatgtagggaaatgaaggaagatgtctttttgaaagaacatggttagtgccttttttgtacataacacagaacatgtaaataatttgttaataagtcagattatgctgatgatcatgatgggatgaagtcagattcgtttgcctcgttgttaaggcacagcctggtcttcattgtgtctgtgatggcttacctcgcatgttgtactgactgactctgccctacttgttttcactattttgtgtattatctgttttctctgttctgtatttctgctgcttctcctgactaaagttcacctcacatccttcctttggcctttgctcaatgtcggtgactctccctgcaagtcattttcctgcaggttagaatagctgtccatcttcacacttcccacaaagcattgcaataactgtggcctggcacttttacctttcgttatgtgttttatcatcatgctctacgactcattgaggaaaagaatttcactggcattgttatatttctggtccctaaaacagtttgtgtgtgtgtgtgtgtgtgtgtgtgtgtgtatgatgctcgtataatgggtaagaactgagatagtgatagttttaatgtcaaagaaaagataagtattaactatcacataaccttagnnnnnnnnnnnnnnnnnnnnnnnnnnnnnnnnnnnnnnnnnnnnnnnnnnnnnnnnnnnnnnnnnnnnnnnnnnnnnnnnnnnnnnnnnnnnnnnnnnnnnnnnnnnnnnnnnnnnnnnnnnnnnnnnnnnnnnnnnnnnnnnnnnnnnnnnnnnnnnnnnnnnnnnnnnnnnnnnnnnnnnnnnnnnnnnnnnnnnnnnnnnnnnnnnnnnnnnnnnnnnnnnnnnnnnnnnnnnnnnnnnnnnnnnnnnnnnnnnnnnnnnnnnnnnnnnnnnnnnnnnnnnnnnnnnnnnnnnnnnnnnnnnnnnnnnnnnnnnnnnnnnnnnnnnnnnnnnnnnnnnnnnnnnnnnnnnnnnnnnnnnnnnnnnnnnnnnnnnnnnnnnnnnnnnnnnnnnnnnnnnnnnnnnnnnnnnnnnnnnnnnnnnnnnnnnnnnnnnnnnnnnnnnnnnnnnnnnnnnnnnnnnnnnnnnnnnnnnnnnnnnnnnnnnnnnnnnnnnnnnnnnnnnnnnnnnnnnnnnnnnnnnnnnnnnnnnnnnnnnnnnnnnnnnnnnnnnnnnnnnnnnnnnnnnnnnnnnnnnnnnnnnnnnnnnnnnnnnnnnnnnnnnnnnnnnnnnnnnnnnnnnnnnnnnnnnnnnnnnnnnnnnnnnnnnnnnnnnnnnnnnnnnnnnnnnnnnnnnnnnnnnnnnnnnnnnnnnnnnnnnnnnnnnnnnnnnnnnnnnnnnnnnnnnnnnnnnnnnnnnnnnnnnnnnnnnnnnnnnnnnnnnnnnnnnnnnnnnnnnnnnnnnnnnnnnnnnnnnnnnnnnnnnnnnnnnnnnnnnnnnnnnnnnnnnnnnnnnnnnnnnnnnnnnnnnnnnnnnnnnnnnnnnnnnnnnnnnnnnnnnnnnnnnnnnnnnnnnnnnnnnnnnnnnnnnnnnnnnnnnnnnnnnnnnnnnnnnnnnnnnnnnnnnnnnnnnnnnnnnnnnnnnnnnnnnnnnnnnnnnnnnnnnnnnnnnnnnnnnnnnnnnnnnnnnnnnnnnnnnnnnnnnnnnnnnnnnnnnnnnnnnnnnnnnnnnnnnnnnnnnnnnnnnnnnnnnnnnnnnnnnnnnnnnnnnnnnnnnnnnnnnnnnnnnnnnnnnnnnnnnnnnnnnnnnnnnnnnnnnnnnnnnnnnnnnnnnnnnnnnnnnnnnnnnnnnnnnnnnnnnnnnnnnnnnnnnnnnnnnnnnnnnnnnnnnnnnnnnnnnnnnnnnnnnnnnnnnnnnnnnnnnnnnnnnnnnnnnnnnnnnnnnnnnnnnnnnnnnnnnnnnnnnnnnnnnnnnnnnnnnnnnnnnnnnnnnnnnnnnnnnnnnnnnnnnnnnnnnnnnnnnnnnnnnnnnnnnnnnnnnnnnnnnnnnnnnnnnnnnnnnnnnnnnnnnnnnnnnnnnnnnnnnnnnnnnnnnnnnnnnnnnnnnnnnnnnnnnnnnnnnnnnnnnnnnnnnnnnnnnnnnnnnnnnnnnnnnnnnnnnnnnnnnnnnnnnnnnnnnnnnnnnnnnnnnnnnnnnnnnnnnnnnnnnnnnnnnnnnnnnnnnnnnnnnnnnnnnnnnnnnnnnnnnnnnnnnnnnnnnnnnnnnnnnnnnnnnnnnnnnnnnnnnnnnnnnnnnnnnnnnnnnnnnnnnnnnnnnnnnnnnnnnnnnnnnnnnnnnnnnnnnnnnnnnnnnnnnnnnnnnnnnnnnnnnnnnnnnnnnnnnnnnnnnnnnnnnnnnnnnnnnnnnnnnnnnnnnnnnnnnnnnnnnnnnnnnnnnnnnnnnnnnnnnnnnnnnnnnnnnnnnnnnnnnnnnnnnnnnnnnnnnnnnnnnnnnnnnnnnnnnnnnnnnnnnnnnnnnnnnnnnnnnnnnnnnnnnnnnnnnnnnnnnnnnnnnnnnnnnnnnnnnnnnnnnnnnnnnnnnnnnnnnnnnnnnnnnnnnnnnnnnnnnnnnnnnnnnnnnnnnnnnnnnnnnnnnnnnnnnnnnnnnnnnnnnnnnnnnnnnnnnnnnnnnnnnnnnnnnnnnnnnnnnnnnnnnnnnnnnnnnnnnnnnnnnnnnnnnnnnnnnnnnnnnnnnnnnnnnnnnnnnnnnnnnnnnnnnnnnnnnnnnnnnnnnnnnnnnnnnnnnnnnnnnnnnnnnnnnnnnnnnnnnnnnnnnnnnnnnnnnnnnnnnnnnnnnnnnnnnnnnnnnnnnnnnnnnnnnnnnnnnnnnnnnnnnnnnnnnnnnnnntctctccagccccctatcttggacttcttaaaagaactttttatgcagctgaaacttacctacatctttatgttttctacctctccaagcttccatttttagtcctcctctcccacccaagaaaaccctgtagttttttgtcagtgtagtggtagtataatgtttgtttctgaggttgtttgtgttaaaggtggcttcagtgctggagctataaccagtggtagaacactcttttagcatgcatgaggcccgtggttcaaccctcagaacaatctgaaaaatagatagacaaataaatgaaaagtgtcttcagagcagcttagatgcctaagctgacaaagcattttctagcaagcctgatggcctgaggtcagtcgcagggttcgtgcgatgggaaagacattgggcttccttccacaagtgctccttggaactctacagagacaatatagcaagaacacacacaagtaaagatgtataaaaaaaagtttacaagtgtcttagttacatattacattctgaagatgctttcactgggcatagaattttttccatacttgggagatactattattaatatcaacagcatgtgaaagataacctttaaaattcaccacttaataaaaacattttttagcaggcttatgatcagaagaacattagacgaagagtttatgatgctttaaatgtactaatggcgatgaacataatttcaaaggaaaaaaaagaaatcaagtggattggcctgcctaccaattctgctcaggaatgccagaacctggaagtaaggaggagcgctcctagatagttagctgggttttgcatgcaagacatttccatttagaaatataattatgtgatgttaaaatgttcctagttgttcatgtttgctttactttaacattactttaagactctggaatattttgaactggaggagttttggagatacagttcgcagtttattttacaaaacctggaactgaggaacaaagtgtcaatgagtgggttgggcatgaaggtgatgacggcatatacctctaatcccggcacctaggaagcaggaggaggatcgagggtcaagatcatctcaattatttggttcaaagctagactaagtatataccctgtctcaaaacagaccagcaatgaaaaaccaacacaagatcatcaacaaagttaaatgaatgggtttcatttttgtcatttcttacaagagggcatcaattccattatagatggctgtgagccaccatgtggttgctggaaatcaaactcaggacctctggaagagtagtcagtgctcttaaccgctgagccgactctccagccctccttttattctaatataaatctaagtatctgccaatgaattttggtaggttatctaacaaatctaattttttgttttgtttttcaagagacagcgtttctctgtgtagccctggctatcctagaactcactttgtaggccaggctggcctcgaactcagaaatccacctgcctctgcctcccaagtgatgggatcaaaggcatgcgccaccactgccctgcaaatctaatcttacttgattattttgatgcaaagtaaatctattttatacaaacaatagctcaagctggtggcttgtttcctgtgttgtttattcaatatcctaatgataactatggaagttagatctacctttgactcactgttagtaagtgacggggcagcgtgtcatatgtggccttcattaattctagaataatatttaaaagcattttagcttggttaattttaagcactgtagaaaaatgtccttaaatgagtgtttcctgtcacagtgtttctaacttggtttgttgtaattttactgttaagaccatataaactgaggttaacagtggctcatggagataattacagttggtttcaaattttactcagtactccacccaacctagaattgttgttgttgttattattattaatgacagaaaaaaaagacattcatcaaaggctacagggtagtgtttttatgtgctacagtagaagtgtctcccttctcttcttcctaagtaaaatttgaacatcattttaattacattatcaataatattaaggtgatactaaagacccataagctaaaatccactaacattaccatgtccttaactacagaaaagacaaagtttagcactaaaatcaagaccctaagaaacagttcctttattaaaggagatgaaaagtagaaaagttgtcaaaatgtgatttaatctgggctcaaggtaagaactctgtgttagagctcttgccgtgtatgaatgggccctgattctatctaaggaggaggcagggagggcatggccatgaaagcagggatggatggaagagggggagaggagaacagaaatttgtcaaatgcttaagggtggagagggcatttgtttcatggaccaagacaggcacaagaaagtgtgcttatagctaaatgtggccaagatacatagctgtagagaagtgatacactcatttctgaatgttagacagcgtaggcctgatctggaaacagtgggaagctatttttagaatgctggatccaacagtctgcacctgtaattccagcacttagaaggtggaggcaggaggatcacaagatcctgtcaggtttgagtgacatagtagcactgtgtctcaaaaaagattttttaaataaaacatacctggtagaagggggaaatgtaacagagaaggaaggatatggtctgagctaagtaggtcagagaggcacattagagaaaggatgggtgtgggcataactggcagggagggcatagcctttattcttagctcagtgtcccacagatagatggtcacatgacttttaagtaatacaaagggcagtaatggttagtagaactatgaaaaaggactcctagtatagatcagaggagagaggagcaaacaggaaatatggctgaagcagtgagaaaggctatttacttgatatgtcaaagaagaaatgaagcaaaggttggcaagaagatgttgagtttgagcctagcatgagctacagagggagaccctgtttcaaaaaacacaacagcaaaaggtgaaagaacaactttattttagattctctttgggagcgggagaggtgacttggtggctgagagcactcgatgctcttgtagaggaccagggtttagttcctgacacccacatggtagcttagaaccatctataactccaggggatctaatgccctcttctagcttccaaggaaaccagacatcaggcatacatgtggtgcgtagacacacatggaggtaaaacactcataaagtaaaaataaatgtttaaagaatgatttaaagatttgtttgtttttataacttacgttttaaagatcgagaagcagaggcggatagaacggataaagcagaagcgagcccagctacaagaacttctccttcaggtaaagatttggcatatttttctctgcctgtttgctcctaaagccagtgtgtttgatagttacagtgtcatcagatactatctggaagcatatcaacagccacacaagttgttgctcactgattgtgaatgctcagcccttctggatctccatctgtcacatttaccctcatccctaactcccaagtccaccttgggtgcagcagctccctttgcgggttcactcttacccagaagtcaaactatggaggagttttgctgtttgttgttttgtccctagatgggctctttcagatgtatcagaactggcaagcctttttggcctgacctctatagtctcttcatgtagtctgtactaaaagttgtatattgtcttccaccagaggcagatataggttccctatcagaggcagaacaagtcccacttcatgctgagagaaattatttctgccacaaagaggaggcaaaatgaggaacgagttttggaaaggaaggcttctccattgacaggctggcagctgtgtaaacacatctccagagctggcccaatttggccctgaactggctcttttctgggactggggacctggagaaaagggcaacatgaagcctcgggtttctgtatccactaggaagttcatggtgtgccatcttataaagttatgtggggctcctcaagttggttctggagaggtgagtctccagaggacccgtccatgctcggatggagagctgcttccaagctcttgttgctcatgggccatctcgccctccaggaattgcctcagcagtagggaaagggttgaggaagtggtgagacataactcgtcttaccctggctggccgcagaggaagcctgttctagaggagtacttcaggatgggccttcctcgggtagctttcctagcagccaggaggttattgtcatttgtcctcttactgctccctttccaggttctgtttgtaaaacactaagatggtagtctagacagattggtccaggctcttcgcctagccagcagggtttgaagttttctatggatatctggggatggttgggtgacgaatttgtctttcaggaggaccttgtcctccagcattccagtgctacattagtatgtgttcttatgtcttctttcccctctggagaatccaatgttagattagtatgttttcttatgttttcttttcccctnnnnnnnnnnnnnnnnnnnnctctggatggatcactcagagagacctcctggactcctgtgggaacttggtcctgtgcatcttggatctgggccatatagtagtcattaccagccactcttggcctttgtctttcttcttccaaggtcaaggtcttgtctgaaatgagcatgaactctctccaggccatgctgtaaaggctgtttagatgctacgatgtctgtacacgctgaccaagattctcagggaaactacctaattccccttttgatatctttaagctctgctaacaagaatgggtctaaagtttcccctcttctgcaagggaaccacgctagaggcctcaaggttgtcttcttgagttcctctgtggtacgatgggcagggtagcagggaaccaggactgccaagttagaatatatgggtttgaagaaaagaagactcaggtatcaggctgcgtgtctgccttactgctggggtgctggagcgccagcaacatgctgctctgaagaggcaaacataccctgtgataggggtcccagcccatggtttttttttaggtgagctatagtcttgagttgtcagcagcaagactccggtgatagggctatagggctgggtagtggctctcttgatttcagaggtgcagagccaaaccacagaggctgacaaaggagcaggacaattgtgggccagttcagatagtcttgaaaataaaagaaagttgataggaatgttagatcatcctccctctcatgcagagttgggccagtgtttgtttgtttgtttgtttgtttgtttgtttttaagacccgatcactttatatagccccggaacttactatggagactaggcaggcctcaaactcagacatctacctgcctctccctccagagtgctatacccggctaaggcatctaattttttctttttctttttcttttttttttaaccagcatccaggagttattgggactatcagaaccttttctgtcttaagtgtctgaaaatctaattctgcccattgtgaaggcagtcaagtagcaacttcagagactcttacagccattttatcctatgtgtaacatgaaggaggagaaaagacagagaagtcttgggtggtgggttcccttcccctacctgaattccctagtccacctggaggggcatctccagcctgttcacagaggacagttagtactgtctaatctgtcccaggaaggggctagttcaggtacagggatttctgcactgccggtggctcaggctcatgccatctcctagttctctcctgtagtctgattatgtagggccatatcacccttttgtcccaggccacgtatttttgatgccctcatccctaaaaacacttggtttgccatctattttcttgcaagaagagtatcagacagagaggatggctcctcagtaaagaatggcttaaagccactgctggtgtggcaagaattatctaatggggagaaaaatggccgttgtcccaaggatcatcagagaagaaaagtttgtagtgcagctagtaggcatctgtctgcaagggatatcagttctaaggacatggctgtaatcatccctgtgttaaagtgagcaatgcgagacaggaatgtcctcatacaaaaggactgccagacaggggtgcagttagtagagtgcttgcttagcttttgccatgcacaaagctctgggttcagtccccagcaggtttagtggtacatacctatagtcctagcacttgggaagtagaagagtagaatcagacgttcaaagccaaatacatagcaggttcaaggccatgagaccctatcctaatcaataataaaataaaacagggctttcaaatgtttcagtgcctggcacaaagaatgaggttgagtatttcttgtccttcacttatctttataccagaaatatgcccatcatttgtaagtcttaatttttttcttctactttctctcaagccaaacatgtatagattttaacctgagggtagcctggtacattttatagaattaggtagcttcagacaataaatgaaactcaagctattattaaaaacagtaactgcagcttttctgtagacatacaacttaatttctcttaatgtttcatttttattccttttattaaatgagatttacagagtaatcataggaaataaattatccaagttgtccctgtacattaattgttatagctgaactggcttggtttttcttagtgtcatagctcattgttttatgacataagttaactattagtcactcttctcacgtgctctagttaggtttaactatagttttcaaggttgcccagatcagatggcaagtctgttagggattgtcttggttgttaatgatgtaggagagtccaggcctctacggatggcaccattccctggaccagtgctctgggctgtcaaagaatgcaaagtgtggatctgcaaacaaacccacgaatagtctcccacggtttctcttcagagctcctgttgagttcacccagggagtttgaaatgaaccctttccttccctgagttgtttttggtcagaatattttatcacagcaacagaaaataaccaaaatgccacctcagttaatattatcaagagtcccacacaggcatgcccagaagtccatctcatggtgattcttgtcaagctgacagttgagataagtagttgactacattatatgtatagatggctcatatgttacttttacatatatataactgtcttttcctgccttaaactgtccccataagggggacacttaatgctgttcagcttctggaacagatggtattgagtctgaaaagaacaaaaagccaaagggagtcaaaaaggggccacaaataaggaagtcagtccacagtacatgggaggtaattttatttttactatgaaaataacaatattaggttaggggtatagctcagtggtagaattcttgcctggtgagaacgggcctttagttcaatctccagcatgccaaaaaaataaaaaagactaaattacctttgttcccactgctttcatcatcatctacaagtttgatgctgtctaacagtgagtcgtaagtacgtaaggactctccttattcccatttatgttccttcatatattgaggctctcccacagcatgggggccacaaggttgggtagagtatccaaacagctcccaagatattgtgatctagttcaggaccttccactaagtgaccccttctatgaggagcctgtatatgatgtgataattttgttgataataaaccataaagaaatttcatttcaaagtattttattcttcatttaaaaataattttaccttttattaaagacaaaagcatatttggatataggtgatgaatgttactctttatttttacatcaaatttgaggccaccatgatggctagtgggtaaagacattttgattgtaactctggcaaacggagttcacttcctagaataccacataaggtacaagaagaggaccagccccccaaaggtgccctatgacctcacacacatacaataataatacattttattattttaaagaggcagaatttgtaagatttgtatttggcagaattggtaagtatttgatattgcaggtcagaaagtatcttcaacgtctttcagagttgattgtcattttgattttataattttcagagaatgccgctttgaacaaatacatcataccagatgatagaaatatgtttatgatattagaaaaactgttaaaattctaccctaatcgcaagccaaaattaatataatgatttttttttttttgtatctcgagaaactttttgttgttgttactgttttgaggcagggtctctctacatagcctctggctgtcctgcaacttatttatgtagactagactagcctcaaactcacataaatctgcccgcctctgcctcccagctgctgggatttcagatgtgtaccaccatatccaactcaagcaacgatctttaaaatcaagcattgtaacacaatttaatccaaagataaactaattgtatatttacatgccaaggaatggtggtagaaaaatattacaagtctttgttttccataattgattatattgtctataagagtagaaaactctatagagtaaaaacactgcagttcatattagaaagttctgttgactgaggtgattgtttgtgttgcatggtgtgagggcatagacagtgcacagtgttcttgttgtgtgttgtgagcccaagcttcagtacagggaggcttgggctggattctaacggcacccagagtagctcctgagctatgtaaaccttagggacctatggtagagatttggggcacagctggcaagggcttgaagcctagcctcctgcagctagccagactggtgctgtgaccgtctgagtgtcccagatatccttttgaaattctggttttaaggaattgtgtatatccctgggctagatactatagatgaggtgtatttaaccctaaatttaggatgctatatgagataaatcaaatcaaagcttccttggaatcattctgaaaagaactattgcctgtgctgcgggttctcccgtatttctgagagcctgtttctctgggagatggaaaccagaggctacagtagttacttagttagacatcatcaaaatatatgtgttttgctgggtgtggtggtgcacgtctttaatcccagcactcaggtggcagaggcaggagaatctctgtatatgggtttgaggccaacctggtctacaaagtgaattccaaggcagccaaggctgttaacacagaaatcctgtcttgaaaaagaaacaaacacaatatatgtgttttacccttgaaatatgtttattgaatttaaccatcataatcttttatcatgtttaacttttctattcagtagtacagaacaggccacctgtttaaatactctaattttgaaatagattttttaatgtattatgttaattcacttaaattccaagtcactttttcatattttaaatgacctcatttgtttattgaacattacagcaaattgcttttaaaaacctggtacagagaaatcgacaaaatgaacaacaaaaccagggccctccagctgtgaattccaccattcagctgccatttataatcattaatacaagcaggaaaacagtcatagactgcagcatctccagtgacaagtgagtggggagccggggagggcaagggctggccttcccttactgttctcccgtgtaaggatggcgcactccactgcatgcagccctttaagaatggcttccatggggtatgtgaaatgcgttttcagttggagtgagctccatccttcacagacccttcctccatgtcagacttgcttgtgacatgtgtggtaactgagcaagtaactgcagtaagtaagaccatcacgaagggcacaggaggaaaatggttcattggtaagttacatgttataggttattatgaaaatatatcagaccaatacatggtgttaaatcaactgtttcattttattgtgttatacttaagtaagcttctatttgttatttattttgttcttttaagaagaggtcttgcctgatagtggtggcgcatacctttgatcccagcactcgggaggcagaggcaggcagatctctgtgagtttgaggccagcctggtgtacaaagcgagttccaggacagtcagggctacacagagaaaccctctctcaaaataaagcaaaaaataaaattaaattaaaaaggggtctcattgacgtcatcttccttccacccctcccatgtgctcagatgaaaaagtgtgtgccttagcacctgctgcgtttgcttattactcattacgtgaacagtaaactcctgctttaggctggggagatggtacagtgcgtaaagtgcttaccccacaaacatggagtccctgagtgtggatccccctcgcccacataaaagctggtgtcccaggcttactatagccctagctgtagggcagggtgggtgaggataatgataacaaagacaggttcgccagggcttgccggccaggcagacggcaagcatcaggttcagtgagaaaacttgtcataaaaaaataagtggaaagtaacagaggagctttgaaaatatttttaacaatttaaataattgacaccattcactttagcaagtaagagatagtacttttcagagtagagcgttcattctatcttacccttcctctggcagaagttagaggtacacagaggatgagatgagtccggctgtgggttagagctgcagctctgcctgctctgtggagcagggtggaggaaaaccagctctctcacctctctgccctccgctgccctcggctgcgagaatacttttcaacagtcctgttcattgcatcgttttattagtgtgagctgctgttcttggggatcagcagctttcattctttaaatttcttagcctctcttgagatctcattgcttcctccacaaaaaaaaaaaaaaaaaaaaaaaaaaaaattagggccagcaagataactcagtagataaaggtgcttggctgctcttccagaggtcctcagttctattcccagcaaccacatggtggctcacaaccatcagtaatgggatctgatgccctcttctggtgtgtctgaagacagctacatatatgcattaaataaataaataaataaaatggattcaagaactaaaaaattaaaatcagttatttactttataatttataaaagctagagataaattcacacaatatctagcccagtaaaatgttatgtgtcaagattattattcacagccaccaacttcagaaacctatgtcaggaaggactgctaactaacatcctaacaccaaagtcttcacaacggctaacatctctggaagcaacctataaatgtcagactgtaacacatctcggcaattactttctaaagctagtctcgtcttttatgagggaatatgaaattaccttcttaggttgaagggcttcagcagctgagcgtgtagcacataacctcaggaggttgagcacaggattgggataagctggtcagcattgatcaaccaggagaactgcgtaagagacttgtctgaaaaacaatttaaataataaaaattaaaaaataaagagtgtcaggaaaattgggaaccattgaccttagcagattatgggcactgttcacccaggctagaatctattttggttctgtgccttgggtggtcgctgactcatgccttgcctggcatccattcatgaatagcttgtacacgcttgttgtttgaggtaggtcactaatcttgtctgtcaattgctttgtgaagcaatcttacccttaattagccaggaggctttcccacagtgaaattaagtttacaaagccatctgcattatatggaagggatgcctgaaatcagccctctggcaaggtacccacttcagatgaactttaagcttggtaacgtattttattcagactcatatacttagcattttgcttcaagttatagatttttcctggtgtaagatgtagtaagatgaaatctcaacttcacatgattttactagagaattccataacaaggtaaaactcactacttgaggcctgaactggaagtcagttagttctgtccttccacagaatatgtcctggggatcaagcttcagctatttcttgctgtccctatctttgcttcttgattgttgttctgtatagctagacatctgaactgactacctttcaaggaagtcctgattggtgctgtgtactttttatatggtaatttttatttgcttgtgacagattctcactctgtagcctaggcttccaagtgatggtatttcaagtacaagccaccctgctcagccctgtgacactgacaagatttattctttagcttctcaagacaggattaactgggtttggtttgttaaaaatgtcttccatttaattcaagtatgtttagcacaagggcctcaagtcccaactatctagaaggatctcttgagtccaggagtttaagtttaaactacagtgtggtacaacccatcttaaaagaaaggtctttatgcttgacagaagtatgctgtgtctagcctgtgactcaggaaaatgaattaagcatccaaaatggttcctcaagaccaatcaaccagtctgttagagatacaaaccaagttagaaaggcttttctctatagcaaagctgtagacaactttggagagtactgtctctaggacagagtttctctctcccctcgtgtaacattaccggggctttagtggacttgtgtggccagctgacctggaaaggttacgaaggctttgcttgaaaatggccgtgtgccctgctgctgttctaagtgctctttatggcggctgagcttaggctcttgttccattatttaagtgcagaaaaggctggggtatagttcagaaggcttttgtcaagcaatcataaggccttgggctccttccttgcatcacaaaaagtaaattaaacaaagcataggatataaaatctgtcagagtttctctgtagcaccaaaaccctcaaacctcctttatttcttaaagacaaactgatgatgtgtttagggtgtgcgtgtgcgtgcgtgtgcgtcgtgcgtgcgtgcgtgcgtgcgtgcgtgcgtgcgtgcgtgcgtgcgtgtgtgcgtgtgtgtgtgtgtgtgtgtgtgtgtgtgtgtgtgtatgtgtgtgtgtacatgtgatctaagcactgaactccctgtctggcaccttgacctccctcacccctgtacctgctctgttttgcagatttgaatacctttttaattttgataacacctttgagatccacgacgacatagaggtactgaagcggatgggaatgtcctttggtctggagtcaggcaaatgctctctggaggatctgaaaatcgcaaaatccctggttccaaaagctttagaaggctatattacaggtatgctagccacactgacagatccctgactgaacctctcactcacttgttaaatcttcacacagaatgcagcaatttagagactcaggactggcttcaccaggggcatcctttagtactttttatagttaagtttgttacttgaaaaatggaacccacatctaaacataaggtttatgtatcgttatatacagctgtacccaggggacccaggctagtttaatataacctatgctttgactgtggcctgtcacatgagctccaattttacacttttggcattatgtcagtgcttagaaattttcagattttggaacatttcagatttgaaatttctcaatttgtaccaattccttccactttatagatgtaccacagtttcatccattcatcagttggtacacattaggttctttaggattttgggctattttgaatgatactacttttaaacatttttatgggctgatgagatggctcagccagtaagagcactgactgcttttaccaaaggtcctgagttcaaatcccagcaaccacatggtgactcacaaccacctgtaataagatctgacaccctcttctggtgtgtctgaagtcagctatagtgtacctatatataataataaataactcttttaaaaatttttataagcattttgttttataaacatatttttggctttgttggagtaaaacttggattttttttaagtgccaaatggttattacaatgactataccattgtacaatcctcctaagcaatgtatgaggcttctgggttttggtttttttttaaacatccttctcactatcctccccaccccagtttggtactagtgattgactgcatggctctgcatgataaagatacaacctaccaccaagttccttccagccctgtttgtccttatagtttcacactctggacatgaagtggtaaatcatggtgatttttatttaatttctctaataattcagggccgattttcctaattctaacatttattttgcaaaggaacttgaacatttcatctaaaacttcacatcacattttttggtggttgttgctgttctttctttctttctttctttctttctttctttctttctttctttcttttttcttagatattttctttatttacatttcaagtgttctcccctttcctggtttcacctctgaaaaccccctatcccatnnnnnnnnnnnnnnnnnnnnnnnnncccttccccccacccactctcccttccccagcctggcattcccctacactggagcatcaagccttcacaggaccaagggcctctcttctcattgatgtctgacaaggccatcctctgctacatatgcaactggggccgtgggttcctccagctctttggttggtgatttcatccctgggagctcaggagagtctgcttggttgatattgttgttccttctatgggactgtaaaccccttcagctccttcagacctttctctaacccctccattgggaaccccgtgctcggtccagtgttggctgtgaacatctgcctttgtatttatcaggctctggcagagcctcccagggaacagctatatcaggctcctgtcagcaaacacttgttggcatccacaatagtatctgggtttggtgactgtatataggatggatccccagatggggcagtctatggatggcctttcctttagtctctgcttcagactttatctctgtatctcctcccatggttatttgttcccccttctaagaaggactgaagcatccacactttggtcttccttcttcttgagcttcctgtggtctatgaattgtatcttgggtattccaagcttttaggctaatatccacttatcagtgagtacataccatgaatgttcttttgtgactgggttacctcactcaggatgatatcttctagttccatccatttgcctaaaaatttcatgaagtcattgtttttaatagctgactagtactccattgtgtaaatgaaccacattttctgtatccatttctctgttgaaggtcatctgagttctttccagcttctggatattataaataaggctgctatgaacatagtggagcatgtgtccttgttatatgttggagcatcttttgggtatatgcctaggagtggtattgttgggtcctcagatagtactatgtccagttttctgaggaacctccagactgatttccacagtggttgtaccagcttgcaatcccaccaacaatggaggagtgttctttctccacatcctcgccagcatctactgtcacctgagtttttgatcttagccattctgactagtgtgagatgggatctcagagtcgttttgatttgcatttccctgataactaaggaaagatgttgaacatctctttaggtgcttctcagccatttggtattcctcagttgagaactctttgattagctctttgactaacccatctttcaatagggttgtttgtttctctgaagtctaactttttgagttctttgtatatattggatattaaccctttgtcggatgtagggttggtaaagatcttttcccaatctactggttgccattttgtcctattgacagtgtcctttgccttacagaagctttgcaattttatgaggtcccatttgtcaattcttaatcttagagaataagccatggtgttctgtttaggaaaatttcccctgtgcccacgtgctcaaggctctgtcctactttctcacttctgtaagtttcagtgtatggtttatgtggagctccttgatccacttggacttgagctttgtacaaagagataaaagtgagtcgattcgcattcttctacacgctgacctccagttgaaccagaaccatttgttgaaaatgctgtcttttttccattaaatggttttagctcctctgtcaaagatcaagtggctataagtgtgtgggttcatttctgggtcttcagttctgtcccattgatctacctacctgtccctgtaccaataccatgcagtttttaatcactattgctcagtactacagcttgaggtcagggatggtaattcccccagaaggttttgactgttgtccaggctggagttgaactcttgtgaccctgttgcctaggctttcagagtagctgagaccaaggtgcacatcactgtacatctcttcaacagagctctaatattaggtaaggtctataaaatcgcactcgggaggcagaggcaggcggatttctgagttcgaggccagcctggtctacaaagtgagttccaggacagccagggctaaacagagaaaccctgtcttgaaaaaccaataaaaaaaggtctataaaatcaaatgtaagcaaaaaggtagtttgtctgtttgctcactgagtttattggctgagatttatgttgtatttcatgtgttaagttagtaccacgtaccgtctgcaagcgtgacccctcttccctcctgcattcagctggtctgtgtcccacttacgcactggtccctgctccctttgctcccaggcacagatcttgctgttttcattatagcctcactgaactggaagcctagcagtatctgaatgaaaaaggcttactcaacaaactaccagaacgttattttcactggtgaaggctcgcagcgattagtaggctctgtggtttgatctcctcatgacctcatctgcagactggactgcagattttcttgtcagttcaaagggacacgcagctttagtatggagagggagggagggaatgacccgtggacaggaatgtgagaaccaccaggcacagcccagaataatgggaaagaaatggaggcttcccaagtccattgtagaaaggaaagataatctgtaatgttcacaacggaatagctgtaacccagcagaaagttggcacagggctgggtactaattccaactcagcacaggaattcaccattaatttcaacatcttgttcagacttgctcttcttaaatgtattcataatctgctatccttcttagaattgaagtcttttatttttttcacagctgcctcagcctgtggagaaaaaggctcacaaggctggtgtaaaattcatgtagccattcattcagttcctcattgctgtgtgggaacggtctatcaactgaccagacagggtcctaaccttaccacatagctccattggtttctgcacagtaaaacagtttctgtattacaaaagtagtgtaatacagaggctggggcgtggcccagtgggtatggacactggctgcacagcctgacctgagtttcatccgcagaacccacataaaagccatatgggtggtatgcctcttctctctcagagctcctgcagggagatgaggaggtagaagcagaactggccaatagctctcagagcctcagagccactagcctggagaatgcagtgcagcagcaggaaccgggagaccctgcttcaacaagcttgaaggccggaaccaactccagagcccactaacttccacaagtacactttggtatggcttgacatacccacactcacacagacacacagagacacacatgcccacactcacatagacacacagatatacacacatacacacacacacacacacacacacacacacacacacacacacagagctcaagggctggcaagatagtttggtgggtttgtgattgcatcagacctgatgatctgagtttgacccccagtacctacatctatgaaggaaagagccagccacttaaagttatccttggacttcacactcatgcacagccacacacatacacagaaatgaaagtaatataatatacaagtgtaagtttaaaagtacaataaaagcttatttaagcaaagtatattttctgggtatgcattagattttgccatatgagaatctttttatttttattttactttttggtttttgagacagggtttctctgtgtagccctgtctatcctggaactaactctgtaaattaggctgacctcaaactcagagatgtgcctgcctctgcctctgaagtgctgagattaaaggtgtgtgccaccatgccctgcaatgtgagatcttttttatggctgtgtttctaaagtttttactttttattaaaggccactgttaaaagagactataggcaaaggtcctgggctcaaatcccagcaaccacctggtagctcacaaccgtccataatgagatataatgagatctgatgctctcttctggggtgtctgaagacagctatagtatacttacatataatcagtaaatcttttttaaagagagagagagagactataaatattcattaattctgaggtccctagacattcaggtccagttttctttgagctaatattctgtatagggagaaccactcaagtaacagtatagtaagaattgatctgttgttaggaaaaaggagatggccaggtcatactctcgtggtttcctgtaatgtctgtctcacctttaaagccatgaatgcagacctggagagagggctcagttgttaagagcatgcagtgctcttccagagaacccaggttccgttcccagcacccacttagtggctcactaccacctctaacttgagttccagggaatctaatgccttcttttggcctccatgggtaccagaaatgaaactgttatacagatacacatgcagacaaaacactcgtacacatacaataaaataaaaataaatttaaaaaatgatcgcattattttttaaaaatccctcattaaaagcatggccttttaaaaactaaggactgttttgaatgataaagcacatggcaccacgcagggaactagttaggaaaaagcatagatcattgatgagcagtggtattgagttcacctgcatacgcttaaaagcagtaccccagggagggaagctggttcagttggtaatatccagtgctagggagacagacggcaggacccttggggctggctggtctgctggcctagcctaattattaattagcaagccctaagtctcagtgagcaaccctatctcaggaacatatctacttgtgcgcacgctcgcacacacaccatacatgcactcaaagtgagaggcaagggaaggggtgccgggtgtgaacatctgcctgacccataagatgtgcattctttttaaagatggttctgacttacgcaatcctgactattaacatcacagtcgtggggtttcacgatgaggacatcagatgtccaagacagttcacattcttaccactataccccgtaagctaccttaccaggtcttacatgaagaaagctagagagacgaccaagtagttaagagtatacactgtcctttcagtccagatcctattggacagatcacaattcccatatccaggggaatccacacctcttccatgggtacctactttcttatccattcacccgaaactcagggcttcacacatgatttcagaaaatgtcttggaaaaaaaaagcattgaaggaaaggggagtagtcaaggtgttactttgaattctttctctctggagtctgcctttctatagttttttgggttttttttcctcattcttgttcaaaattttattgtgcctgccctgcctcccaaataaccaatgaagaacactaatttcttcacggggcaggataattgtccagctgtcaccaagacataaaacccagtttacttcagaccacagcagaacagtcacaagagtttgctatagtgtttgtttgtttggtcttgcagatatctccacaggaccttcttggttaaatcagggactacttttgaactctacccaatcagtttcaaatttagacccgaccaccggtgccactgtaccccaatcaaggtatgtagttttttcaaggtgagaaaagcaagccacagagagagacctgacgctgctgtgttgctgctgcaacaagtggctcgggttgagagcaagcagaccttgccagcagcacctccttagttcttattcctatgttgtgcagaaagaaaagcgctgtctcccctgaattaacgagcctgtgtgttcttaacttacttgctagtgtaaaccaagggttgtgcttggatgctgaagtggccttagcaactgggcagctccctgcctcaaacagtcaccagtccagcagtgcagcctctcacttctcggagtcccgcggcgagaccccctgttcattcaacgatgaagatgaggaagatgaagaggaggatccctcctccccagaataaagacaggagagaactcatgttttaatatttgatgctcatgtgtgtctttagtgtgagctcttgtgttttgaaatgattgcttcagtctttgcctttgtttgcatttgtgtttagtgaaaactagagaaacacaataagcaaatcacttgaaggctgagatgattgaactgaaagttcccatagcgtggatgaaaccgagcagcagagcagcaggacatggccaacaaagcgtgctttctgaggacgtggagagtggcagtgacgaaggtcatttgttttcagggaggtagggtttaaagacccccagtgggagcatttagatggcaggcggctgcaaggagtctgcagtggtaacagcttctctctagcctggctggctttggtaggcaaaagtgaacttggaagtcacagtgggatcagaggggtgtaggttgcgatccttgtcgcctgaggagccggtggactgctgagctagtccaggggtagccggtcccctcatgcatctgctgccttagcttctagaacggagcaagcttttacgtacctaggtgacatgtagaaaaatttacagtaaactgaaatgaccatttgtcaatgcattggtgcataggagttactagggctacttctggaagccaaaatagaatagcatctccatgtgcattaaaaacttcgccagcactgccttttgccagcattctaaatttggagttttactgagaaggaaactgtttttatagttttaatcagagctatgcatttcatacagctttttaatttacaatgaaacaaagaaacaaattcctttgaccaaattgcttgtctatagttgtctgcagtactgtatgattttacccatgtgcaatttgtaaaatgaaccagatgtcactacttttgtctttatttcaagaatatggccatcactgttctcttatacatgttcttttccatattttaattatcaaaatgaccatatcagacttattcctgggtaaattgcatttcaaactaactcaatattcagtgtttttgttaaaaccttgaacactccagttgactgcatctgtgctagtgtggtatatcatacatgatcttaaagccaaagatgccatg

SEQ ID NO: 2358 - DNA, 2339 bp, Mus musculus
ttttactgggaaattcatggtgcatttgctctgctttcaaaatgcggtaaggtcttctgctttctgactgactgccttggagccagcagatagtcggacatgtacaattcgaattatgcaggtcttgtgagtaacatttcacttgttgcctttccagtttcaagcaccaactcaccaacaaagattttaccgaaaaccttagggccaataaatgtgaatgttggaccccaaatgattataagcacaccgcagagaattgccaattcaggaagtgttctgattgggaatccatatacccctgcacccgcaatggtcactcagactcacatagctgaggctgctggctgggttcccagtgatagaaaacgagctagagaatttatagactctgatttttcagaaaggcttatgatcagaagaacattagacgaagagtttatgatgctttaaatgtactaatggcgatgaacataatttcaaaggaaaaaaaagaaatcaagtggattggcctgcctaccaattctgctcaggaatgccagaacctggaaatcgagaagcagaggcggatagaacggataaagcagaagcgagcccagctacaagaacttctccttcagcaaattgcttttaaaaacctggtacagagaaatcgacaaaatgaacaacaaaaccagggccctccagctgtgaattccaccattcagctgccatttataatcattaatacaagcaggaaaacagtcatagactgcagcatctccagtgacaaatttgaatacctttttaattttgataacacctttgagatccacgacgacatagaggtactgaagcggatgggaatgtcctttggtctggagtcaggcaaatgctctctggaggatctgaaaatcgcaaaatccctggttccaaaagctttagaaggctatattacagatatctccacaggaccttcttggttaaatcagggactacttttgaactctacccaatcagtttcaaatttagacccgaccaccggtgccactgtaccccaatcaagtgtaaaccaagggttgtgcttggatgctgaagtggccttagcaactgggcagctccctgcctcaaacagtcaccagtccagcagtgcagcctctcacttctcggagtcccgcggcgagaccccctgttcattcaacgatgaagatgaggaagatgaagaggaggatccctcctccccagaataaagacaggagagaactcatgttttaatatttgatgctcatgtgtgtctttagtgtgagctcttgtgttttgaaatgattgcttcagtctttgcctttgtttgcatttgtgtttagtgaaaactagagaaacacaataagcaaatcacttgaaggctgagatgattgaactgaaagttcccatagcgtggatgaaaccgagcagcagagcagcaggacatggccaacaaagcgtgctttctgaggacgtggagagtggcagtgacgaaggtcatttgttttcagggaggtagggtttaaagacccccagtgggagcatttagatggcaggcggctgcaaggagtctgcagtggtaacagcttctctctagcctggctggctttggtaggcaaaagtgaacttggaagtcacagtgggatcagaggggtgtaggttgcgatccttgtcgcctgaggagccggtggactgctgagctagtccaggggtagccggtcccctcatgcatctgctgccttagcttctagaacggagcaagcttttacgtacctaggtgacatgtagaaaaatttacagtaaactgaaatgaccatttgtcaatgcattggtgcataggagttactagggctacttctggaagccaaaatagaatagcatctccatgtgcattaaaaacttcgccagcactgccttttgccagcattctaaatttggagttttactgagaaggaaactgtttttatagttttaatcagagctatgcatttcatacagctttttaatttacaatgaaacaaagaaacaaattcctttgaccaaattgcttgtctatagttgtctgcagtactgtatgattttacccatgtgcaatttgtaaaatgaaccagatgtcactacttttgtctttatttcaagaatatggccatcactgttctcttatacatgttcttttccatattttaattatcaaaatgaccatatcagacttattcctgggtaaattgcatttcaaactaactcaatattcagtgtttttgttaaaaccttgaacactccagttgactgcatctgtgctagtgtggtatatcatacatgatcttaaagccaaagatgccatg

SEQ ID NO: 2359 - protein, 114 aa, Mus musculus
MYNSNYAGLVSNISLVAFPVSSTNSPTKILPKTLGPINVNVGPQMIISTPQRIANSGSVLIGNPYTPAPAMVTQTHIAEAAGWVPSDRKRAREFIDSDFSLMIRRTLDEEFMML

SEQ ID NO: 2360 - DNA, 2696 bp, Mus musculus
gcggccgtgtcgctgagggcggacggcgtcgggcgcgctgggctgtgcggccgtcgctgcctggcacgcggggcgcgccttgacccttcctgcactgcaggcttccgacgcgcgcgaagaccgcggctgcgcggccgggagcttgctccgagcggacctggctctgcctgaggagcggcggctcgcgaagaagcgtctccccgggagtgggccgagggctgtgtggaccggcggcggcccctctgcaccaagctgcggtttctgttaaaataagcattctgacaaactgctgaagagagagccctgatagactaggatattttaaagaactgttgaagacgaaggtttttatttttgtgtgttttttaatggctttacagaatattaaacagaatactgtttgacatgacggcaaaaaatgttggtttgccatccacaaatgcagagctgaggggctttatagatcagaatttcagtccaacgaaaggtaacatttcacttgttgcctttccagtttcaagcaccaactcaccaacaaagattttaccgaaaaccttagggccaataaatgtgaatgttggaccccaaatgattataagcacaccgcagagaattgccaattcaggaagtgttctgattgggaatccatatacccctgcacccgcaatggtcactcagactcacatagctgaggctgctggctgggttcccagtgatagaaaacgagctagagaatttatagactctgatttttcagaaaggcttatgatcagaagaacattagacgaagagtttatgatgctttaaatgtactaatggcgatgaacataatttcaaaggaaaaaaaagaaatcaagtggattggcctgcctaccaattctgctcaggaatgccagaacctggaaatcgagaagcagaggcggatagaacggataaagcagaagcgagcccagctacaagaacttctccttcagcaaattgcttttaaaaacctggtacagagaaatcgacaaaatgaacaacaaaaccagggccctccagctgtgaattccaccattcagctgccatttataatcattaatacaagcaggaaaacagtcatagactgcagcatctccagtgacaaatttgaatacctttttaattttgataacacctttgagatccacgacgacatagaggtactgaagcggatgggaatgtcctttggtctggagtcaggcaaatgctctctggaggatctgaaaatcgcaaaatccctggttccaaaagctttagaaggctatattacagatatctccacaggaccttcttggttaaatcagggactacttttgaactctacccaatcagtttcaaatttagacccgaccaccggtgccactgtaccccaatcaagtgtaaaccaagggttgtgcttggatgctgaagtggccttagcaactgggcagctccctgcctcaaacagtcaccagtccagcagtgcagcctctcacttctcggagtcccgcggcgagaccccctgttcattcaacgatgaagatgaggaagatgaagaggaggatccctcctccccagaataaagacaggagagaactcatgttttaatatttgatgctcatgtgtgtctttagtgtgagctcttgtgttttgaaatgattgcttcagtctttgcctttgtttgcatttgtgtttagtgaaaactagagaaacacaataagcaaatcacttgaaggctgagatgattgaactgaaagttcccatagcgtggatgaaaccgagcagcagagcagcaggacatggccaacaaagcgtgctttctgaggacgtggagagtggcagtgacgaaggtcatttgttttcagggaggtagggtttaaagacccccagtgggagcatttagatggcaggcggctgcaaggagtctgcagtggtaacagcttctctctagcctggctggctttggtaggcaaaagtgaacttggaagtcacagtgggatcagaggggtgtaggttgcgatccttgtcgcctgaggagccggtggactgctgagctagtccaggggtagccggtcccctcatgcatctgctgccttagcttctagaacggagcaagcttttacgtacctaggtgacatgtagaaaaatttacagtaaactgaaatgaccatttgtcaatgcattggtgcataggagttactagggctacttctggaagccaaaatagaatagcatctccatgtgcattaaaaacttcgccagcactgccttttgccagcattctaaatttggagttttactgagaaggaaactgtttttatagttttaatcagagctatgcatttcatacagctttttaatttacaatgaaacaaagaaacaaattcctttgaccaaattgcttgtctatagttgtctgcagtactgtatgattttacccatgtgcaatttgtaaaatgaaccagatgtcactacttttgtctttatttcaagaatatggccatcactgttctcttatacatgttcttttccatattttaattatcaaaatgaccatatcagacttattcctgggtaaattgcatttcaaactaactcaatattcagtgtttttgttaaaaccttgaacactccagttgactgcatctgtgctagtgtggtatatcatacatgatcttaaagccaaagatgccatg

SEQ ID NO: 2361 - protein, 131 aa, Mus musculus
MTAKNVGLPSTNAELRGFIDQNFSPTKGNISLVAFPVSSTNSPTKILPKTLGPINVNVGPQMIISTPQRIANSGSVLIGNPYTPAPAMVTQTHIAEAAGWVPSDRKRAREFIDSDFSLMIRRTLDEEFMML

SEQ ID NO: 2362 - DNA, 96389 bp, Mus musculus
  misc_feature (1)...(96389): n = A, C, G or T/U
atgctggtatgttaaagccactttagttgggtgtatctcatttgttgctttgagtttgcatacatagaaacaactgagtggtggtagattcagccagattatctagtcaggttccctaaccagagtgacatctctactttctctgaacccattgtatcattctatagtgtagtggttctcaaccttcctaaagctgcaaccctttaacagagctcctcgtgttgcggtgacccccaaccataacattattttcattgctacttcataactgtaattttggttgttatgaaccacagtgtaaacatctgtattttctgatggtcggtcgagaccacaggttgagaagccctttgggacatttgggtaaatactgagatctttgaagaaaggaagggagtttgtattgtgttttcaaggagatagtctaataaggaggtgtggggaattgcagactcgtctccagttgagctgaggtctgaaccccgaaaatggtgataattcacctacatgacacggtaggcgttctctcatgttcctggaactctggctcctgcctaagttactggcccccacagcccccacaatagaagcatggctagaagccacgtaggcaatggcccaagcttctgaccttcaggctaaactccttccgttacctagcaacagtaagataagatagcatacattaaaaagggctgttcagccccacctcgatttcttacttctctcttacttcttacccctcactctcaccctttctgtcttctcctttcctctctccctcttactctctttctctctagcctttcctcttctctctctctctctctctctctctctctctctctctctctctctcccttctctctttccccctgcctttctataataaagttctaaaaccatagacagtctctgctcatcaaggctgcgctcactctcagtgttgggagcttcttccctcatccctctctcctacaaccctggtggcttgagcaaaatagttccggggtttccagataggactgcctcttgccactaccccccgaagtgggtcagagacttagatgcccacccggggatgagtggaaggtagatagcagccctcccacacctgacagaccagagaatagataaaactctggcaggggggctggtgaaatggctcagtggttaagagcgccgactgctcttccaaaggtcctgagttcaaatcccagcaaccacatggtggcttacaaccattcctaacgaaatctgatgccatcttctggagtgtctgaagacagctacagtgtacttacatataataaattaaaaaaaaaaaaaaaaaaacctctggcagggtgtgggttttcccttccctctcttcccccagagccccctttttagttcccaacaaggaggatggacagagccattatagagataagaagacattatctgggaccgacttatctagaattctatagattaggttggcttgtgagcttgccttaaagattttttttttttttttttggtttttcgagacatggtttctctgtatagccctggctgtcctggaactcactttgtagaccaggttggcctcgaactcagaaatttgcctgcctgtgcctccagagtgctgggattaaaggcctgtgccaccacgcccagcaaagatttatttttatttatgtatatgtgtatgctatatgtgttcaagtaaggtgtccttggaagccagaagagggcgttccagatcccctggaactgcactatgtgggtgttcggaacatagctcaggtcatcttcaagaacagaaagtattcccaaaccctgagctatctctactactccatcatcgactatgggtgtaatctcattagctgctgggtgtacctgctgccttcttttccccaaaatgatgctctgtaacctggaattgtgaacaaaataaaccctttctccctatagcacttttgtctagtgttctgtcaacaataggaattgaaactacaacatgttccatatagaatcacctcccatcaagatattcattattgatcatgcactttcctgtttgaataagtatgtataggctgggcatggtgggatacacctttaaccccaacattcaggagacagaggcagacagatctctctgagtttgaagccatcctggtctacatggcaatttccaggagagctagagctgtatctcaaaaaacaaaacaatacaaagtgtgtgtgtgtacctagtataagtgagttcttaggtttatcacaacacacacacggacacggacacacacacggacacagaaaatttaaaatagcatctcagatctcaagaatgaaattctatattttaataaacttccctggtgttatgttttgattgtttatttgtttgtttatttattatttatttatttatttaagacagagtccttatattaactattcaattcatgactttggaccccctgatctgcctcccaagtgctgggattaccgatgttctactgtgtagtaaaacgcttctatggcattgtaagacgagcttggcatgtgtgtctgaacccactctagcattttttaaagattttatttattatatataagtgcactgtagctgtcttcagacactttttcttctctctctggccctgctcactccagccccaagatttctttatttgttaagtacactgtagctgtcttcagacaccccagaagagggcatcatatcccattacagatggttgtgagccactttgtggttgctgggatttgaactcaggacctttggaagagcagtcagtgctcttagccgctgagccgtctctccagacccccaccctagcattttcacccaggccaaatatgaatgaagtagagggttgacatgttgggtaactgtaagaatggaactgggagccataaggagttcacgctccttaaacagtccccctgagatcaaggctcagtagcctccagcagtgactgtcttcatgacatccttggactgacttcgcctagctattcccccactcctgttctttgtagccatatccccaaataaaccaccagaatgtaaccatttatgacaagctgggccaggtggcatacacctgtaatcccagcacttggtatgtggaagctggcagatctttgagcagaagcaccctagctttgactattagcataaaggagtccaggacagccatagttacattgtgagactttgtctcaaaaaaacaaaaaacaaaacaaaacaaaaaaaaaccaaaagttgtttttgtagaggactggggagatgactcagtatggtaaagtgcttgctatgtaatcatgagacctacttgagttctatctctagtatccatgtgaaaaaccctgggtgaggctacagacaactatgtgtcaggaagtgggcccagacaggtggttcccagcgctgggctggcttgccagccaggcagcctagctcagtaagagagttgtcttaaaaagtacgatagaaaaatacatccagtgttgctctggcctgcacgggtctgtgtagaggaacatgcctgctcacaggtgcacacacatgcatataccacacacactaaataaagttctcttttaaaagattttttttgtcacaatgtttgcaacagacaaacttagatctgcactgctagttgttaaatattttgactctcactctccaatgatctaaactctgaaaacatttttacagatgcaagaaacgtgtacacagagattcagggcatccacataagagggggaagggtaaaacaacagaatgttcatcagcaagagcatttatacatatgttttctttatttgctttttgagacagggacccatgctagcccaggccagacttgaattctccaagtatctaagacagaaaagctggagggatgcagagttccaggccagcctgggctacagagtgagattttttttttaatggatattttattttttattagatattttcttcatttacatttcaaatgttatcccaaagtcccctataccctcccggccccactcccctacccactcactccctcttcttggccctggcattcccctgtactggggcatataaagtttgcaagaccaaggggcctctcttcccaatgatggccgactaggccatcttctgctacatatgcagcttgagacacgagctctgggggtactggttagttcatattgttgttccaccttatagggttgcagaccccttcagctccttgggtactttctctagctcctccattgggggccctgtgttccatccaatagatgactttgagcatccacttctgtaatttccaggcactggcatagcctcacaagagacagctatatcagggtcctttcagcaaaatcttgctgtcatatgcggtagtgtctgggtttggtggttgtttatgggatggatccccggatggggcagtctctggatggtccatcctttcgtctcagctccgaactttgtctctgtaactccttccctgggtattttattctctattctagggaagaatgaagtattcacgcgttggtcttccttcttgattttcttgtggtgagattctttttaagcagataaataaaaggactatgtgtgaaattaagaacttgctttcatgaagagtaactgaagggctggcgagatggctcagtggttaggagtgccgactgctcttccgaagatcccgagttcaaatcccagcaaccacatggtggctcacaaacatccgtaatgaaatctgatgccctcttctggagtgtctgaagacagctacagtgtacttacatataataaataaataaatctttaaaaaaaaagtaactgaaattggtctactgccctaatttccagttttcagaaatggacagggttggggggagaggctgtatttcacatttgaggcttccattccaccttactctgttacagtgattaatctgtacacactaggattatagctgccggacaacccttaggtggacattcccattaatgtgttttttctttcttcagtcattgaatggattgggcatagaagaggatgctttaaacaacaaaacaacaacaacaaaatcatgtttggaactgatctgacagcaaattttctaggtgatgaaaaaggtgtcataaatggctgtttctgctcacagtgtgtttggctgaggtgacaatggcatccctttgtgaggttgtaggaaatgtggaatctaggtcacaccttgtaatataaagtttaatgagaattccccaggtgattcctaggacattaaagtccgaggagaccaggaagccacacacagcaggagactcacatcatatgaaatcccttgactttaataggctgcagtttccatagccccctttccattgatgattctaaagcccacatacacacttaccaaaaaggttgactttcttcctcctcnnnnnnnnnnnnnnnnnnnnnnnnnnnnnnnnnnnnnnnnnnnnnnnnnnnnnnnnnnnnnnnnnnnnnnnnnnnnnnnnnnnnnnnntctagatagggtttctctgagtatccctggctgtcctgaaacttactcagtagttcaagggtggccttgaacttacagaaatccacctgcctctgcctcaggagtgccagaggggaggttgacttgtaaaagtttacctatttattattaccgtgtgtgcttatgtgtggacttgtatgtgctatgatgtacatggaggtcagaggacaagaattcttggcactttccttccaccgtgagtactgcggatttaactcttcagcaggccatctgatgtgtgtgtggcaagagcctccttacccattggcctggctagttttatgtcaacttgacacaagctagagtcatctgaaagggggagatctcaatggagggaaaacctccataagacccagctctaggacattttcttaattactgcttgataggggagtgtccagctcattttgggtggggtcatttgtgggatgatggccctgggttccgttaagaaagcaggctgagcaagccatgaggagaaagccagtaagcagcacttcctccatggcctctgcatcagctcaggtttcaggttcctgctctgtgagttcctgtcctgacttctttcaatgatagactacaatgtggagctgtaagtcaactaaaccctttcctacccaagttgctctccggtcatggtattttatcccagcagtagaaaccctaagacacccattcagcatctcactggccctgggtttagttttgagctgagctggccttgaactcacgaagtactagaggctggctttgaattcctgatttttccatctctgcttcactagtccaggcaggagccaccatgctgaccaacagtggctttatctgtatatgtccccatctgtcttatatgccacaggcaacgctctctcagtgaggaacatacagtttttgttctttttttttttttttaatatcagtttaaaacagagtttctaaacctctagggtttttaaattcactctgtaccccagttcaaggttagccttgaactttactttggggccttggaagatattgtggaatgtggacttttaagtgttaaggttagccttgaactcacaactctccagtcttagtcttctgtatacctagtataacaggtacgtactactaggccttgttcatactttgcttctctatccgaatatacttactggctagctgctgtatatttatcaataatggcactgaaaaggaattgctctgactctgaaggcacttagagccacccaggctacagatccaagtgaattattgcagctttcataaatgttagtaaggaagacaaaattttatggggaaagagctggaggtggtcagtcaagagagtcctttttggagtaagttaagtttagctgataagatatacaattaactgggtgagctgaggggttgttgtaagctcacgaaacaccatttaagagctcttgagacatttatgctcgtctttcccatctgtgcacagtaagtgcctaataagtgctgagtcaataaatataccacggaagttcagacctctattccctggcattggagatggtacagacttaatttcttttttcaaaggaaacagaatcccttaacgggggaatgagaagggagacagacagctcttggtgcacattgctaaactgaaactatgagtgggaatgaaaaattgatttacatgaattttcatccctggagcaagtcaatttattctgtaccagagaactttgagtatctggcttcaaagccaagctgttcttccatgttctgagtttttggcctgctgtgaaaccagtgtttgctctcgccttctgcagcacacggtcctgaggtcatggaaattcacagctagatcaaaccagggtatggaaaatttgaaaccttccactgtgtattttactttggggccttggaagatattgtggaatgtggacttttaagtgatctctttcaaaggcaatgctaaagagtgataactggcttacttactgaacactgtgtgcgctgcatatctcatgctaactctcacaagagcataccaagctatatagtaacttcatattgctcaccttagggtttagttcttcttttgttggtttttggtttattttgttttatcttggttgttttttctttgtgtttttgttttgttttgttttgttttgttttttgactttttgagacatgattccttatgtagcactgacttgcctattcaatatgtagaccaggctggcctgaacctcacagagatctacatgcctctgcctcccaagtgctgggactaaaggcatggaccactgtgactggttcaaatgaaattttgtcttcaagttttcattttagaaagaaattaagggaatatggtaagatgaatcagagggtaaagccgtttgtttccaaacctgaaaacattatgttaatcctcaagacccacacagtagaagacaagcatcaattcctgcaagttgtcctttgatctctacacttttatatccccacccccaccccattctagcatgggcatgtagtgtttagttgacaagtaatgagattttgggcattcctttctccacattaacccaaacatttaatgtgccagcctctcttgtggctacacatgttgaggggcttcataatttttcactactggattgaagtaaagacttatttctgtcatgctgactttttatccttaatgctaggattgctaatttgtttgtttgtttgtttgttttgagacagggcttctctgtgtatccttggctgtcctggaacccactttgtaggctaggttggcctgaaactcagaggtctacctacctctgcttcccaagtgctgggactaacggtgctcaccacgattacctagcatgctaagtatttattaaataagcttaacacaataccttaacaacgtttcctgcggaaattaaataaatccacattcacttgtcagtgcaaaaggcaatcattcagttgagacttttggattactgtatgtttggaattttgggattttacccataacaattgtctagaaatagtctccaaatcttccaaagagaaagccaagggtgtttgctcttggcttcctcacctcattatgcattttttctgtctgcttgccttagtttctacctatgtacatcatcattttttgagaaaggatctcactgttatctatctatctatctatctatctatctatctaatgtttttgagaaaggatctcatgtagactcagttggtctaaactcccgactctgccacccagaccatgagctgacactctggggctggtatttacatcaatagccccctctcagagttgtttcccttatcacaccactgaatttttttttaaagaactttaagaagcatctttcctacctcactggaacataagctcaattatgccaagaatttttgtctcttttgtacacacagccctagcatcataaatagtatttggctcatagagctatgaggaaattaaaatgaaaaagatcaaagtattttaaagtcggattttcttatcttacttccaaacgtccacattagctacagttcatacaggatccatgcacttgaaagggggaaacacctttttttggaggggtgggggcagggtcaaagtgtctagccctggctggctcagaactcactgtgttgactaggctggccttagacttaaagagatatgctagtgtctgcctcaggagtgctggggttaaagacatgagccactaagccaacctgaatttcttaataaatgactgggtatttgagagtgtgtgcctccaactttttcggttcaacttcgaaattaaggcatctggccttaatttattgctacactttcccaggaattgaagcatgaccaacctccacagtggtccacgtgtggcctcagggtcacttatccctctgccttccgagtgttcctggagcagtggcccatcagaggtctatggtccagatgtaaggacctagttccggtttctttccgagagatgggatggaaaagagaaccatactttagagctgagagaagcgaggtggtgggtggaggtgaggagaggggctgatgtggtggagggggaagggcgagcctggctgccctctaggtggcaggggtccagcggcaggcagagcctcagggcggcccctagcggagagtggctttggaggtcaaaagaccagggcaggctcccgcaagcccgccgcccacctccgcctctggccctgggggcgagcctgggggcgggttttgtttactccctacacgcactgcggcccggccaatccgtggagagcgtcggcgcgcgtcatgccagccgagggccaatcggcgctcaccgtgctgctccgccgccaaagcgagcgcgggggaagcggcgccgccgcggccgtgtcgctgagggcggacggcgtcgggcgcgctgggctgtgcggccgtcgctgcctggcacgcggggcgcgccttgacccttcctgcactgcaggcttccgacgcgcgcgaagaccgcggctgcgcggccgggagcttgctccgagcggacctggctctgcctgaggagcggcggctcgcgaagaagcgtctccccgggagtgggccgagggctgtgtggaccggcggcggcccctctgcaccaagctgcggtaaggtcccggaaagggcgcgggcctgcgcgccaggggcctttggaccgggcgtggccccccgccggccggctctcccctgccctgtcccgggagtctcagcttgtcctcaggatttctctgcagcggggccaagcaaccctggaatacctgatgaggctccggagcccgcgggctcgccatcacccgggatcaggaagggcaagggctgacttgggcttctcactcagatcttctgactttccctcctcccttcgtgatccaccatcctccagtctgtttctgcggggtgcttttgcagagttccaaagctctccctacctggaagacccccaggttcccccaagagaacttttcctttcaagtagaggttactttctcggcccaagttctgggaggaattctgcacaaggccctggttgctgtgcacagagcagcgggaaagtgactgtgggctccgccgagaggtggcacagtgaagtgcgtggacactcactcgcccgtgttccggtgctttgtgtgggctcagtttgttcatctgtgagccacatctgcctatgcgaggacggggagggtgttgggagagagaaaagggctaatctccggaatgcacttgaaacaaagctcacttctactaaatgcataacgtaaccctggatgctggaggagactctggaccccatgttgtttcaccttttcggctgaaatcgttaccaggcttgtagcctggcctagcaaaatgtttactttgcattctttttccatagcattcgttgaaagtacctttgagcctttggcgacttctgtctttcctcctttcatctcaaggggctccaaccccttatcctgcctcctctaggccagcagttctcaaccttcctaatgctgtgacctgaccccaaccataaaagcattttgttgctacttcataactgtaattttgctactgttatgaattgcaatgtaaatatttaggttttccgatggtcttaggcaagaacgactccctttagaaaggggtcatgacccacaggttagaaaacacccctctacagagccagctgctgtgtttcatttgacttagaatttttctgggtcatttgttttctgttctcctaatggtttgaagtcatcgtaactaggcagtatggtttaagtcattagcctcttttccactgtggcagaattcaaagttgagtataaaatgtttgttttgcatcttgcctcttccagtcactgattatcttacgatttactaaggctttaccactatcccattgctggaattcatgtaagtgtccattctcaaattgcatcaggagataaaggcgccggccagaccccaggttctgtcacgcttgtgtactggctctgggcagagttagttttagaacatcttgtgccttggaactagtttagtgttatggcagatatggtgtcagtagccagtgctggcatgtggttgcagagtcaggaatgcagcacttaacatttgttaagaaagtcccgagacttagtaaacccttctgttgccttaattccaggcatagtaaagtagttttagttattcatattactattttgtggccgtaattcccttccctcgccccttgcgaatatgtagtccttgccgtgtgcaggttttacccttgcagccaaaattcttaactgacctccagtacggtttgagggctggggcatcaatagcgcagtggtagggtaattacctaaacctagattgacgcccagccccggaaatataaaacagcagtaacaagacctcactttgaaataggctgtgcactcctttcttcatcttttaggtttactttggtatgtgtcatgatggccctcagaagaaactagattgggggttgtaagggttttaaagatgattaactataaattggggctggcgagatggttcggtgggtaaaggtgcttgtctccaagtctgctgaccttatctctgtctgtctcagggatccacagtgtggatggacagagctcatcctgaacgttatcctctgactgttccacacctgtgccctcctccaaacaaacaaccccctacacctccccccaaaactaaatgtacttgctttttaatacctttctatcttaacctgtgataacaggactttaaggatttctgaaggctaatgaacccttagaaatggtttgcaagataacttttatttttatacttttaaaagatttgtttgtttgtttatttatttatttatttatttttatgtatattagaacactatagctgtacagatggttgtgagccttcatgtagttgttgggaattgaatttttggacctctgctcactctggtcaaccctgctcactctggtcggccccacttgttcagtccttgctcactctggcccaaagatttatttattactatagataagtacactgtagctgtcttcagatacactagagagggtggcagatctcattatgagtggttttgagccaccatgtaatgctaggatttgaactcaggaccttcggaagagcagtcagtgttcttacctgctgagccatctctccagccccctatttttacattttttttttgagttcactgtcatagtttctaagacaaaactatttgaacaactaacttgaataactaactttttgtgtctgttttgagacaggttcttgccatatattgcatttaaacttactatgtagcccaggttatcctcaaatttgcagcaattctaatgctttagccctatgcttaccccccagttgctagggttgcaggcatacatcaccacatgaaagatttttattttatgttatttcttttttttaaagatatatttatttattttacgtatatgcgtatactgcatctgtcttcagacacaccagaagagggcatcagatctcattgcagatggttgtgagccaccatgtggttgctgggaattgaactcaggacctctggaagagcagtcagtgttcttaaccgctgagccgtctctccaacccaagttatttctttttactgaactggaaattgtatctcacagtatgctcatttcagataattcaagatgtttacaatccattgtttctcctcttccttttcctttctcttctgtgggttttgctggatagctcaggctggccttttacccagtaggtagctcaggctacccttgagcttacagaaatcttgcttggattgcatgtgtgcactcgacacctggcaggtctcttcttctttagacaaaataatatcccggatcctccaagcagggtctcattatatagctctggctgtcctggaactcactatgtagaccaggctggcctcaaactcacggagctctgcctgctctgcctaccgagtgctagaatttaaggcatgcgctacagtacatggctgacaaaatatttttcatcattaaacttttctaaaggatttttttttctgtcattgttttcttctgaacctcttcacaggaccaatgacttcgttttgggttttactgttctctctgtttagtgtgaatgtgcgtgagcagatgccatcatctgtgagcgtgtgcacatatggagcctagggggcagccccttgctcagggctctccactctggctacttgaagtagcctcttacagaaccatgagctcactggtgggctgcagcggctggcttgccaggcatgcacctccttctctctcccctgttctctttctccaggcttacagatgtgagcctctagtcccagctttccatttaaaatagtagaattgcttttttggcagtcacatcctgctaattcataatcataaattaaactcttgttcgtttggtacagggcctcatactgtagcagaggctgacctaggacttactgtgtggctgatctaaacttgtgctagtcctcttgccctagccttatgagttctgacattacaggtttaagtgcctgaggcagaagttaaaatttttatttcttattaattaagaagataaatcctggatatggttttttttttgttttttgtttttttttttttttttaaatcctgggtgtacaacaaacctcagtttctttgtctgaaaaatgggattaatgttagttatctcataggattttaagttctattttaaggaatagaagagggcttttaaaagacagctgtaaacactcaagtatgggccagcacttctcaatagagaaccaactaaatagggtcttgctattttctttaaactcaacttttttttttttttttttttttttggctgaaattccatgcacagtccgccatggctggtcctgccagttctctttttaaacttaatgacgtttctttataagtgtatccatgtgtgaatgtacctgtgtgtgggcacctacagtgatcagaagagggcatcagatcttcagcactgtagttacaggcagttgtgagcctacagggcacagggaactgaactgtgtctagtcctctgcaaaaacagaagccactgctgaaagatggagagaagccatctcttcctctcaggaatttatacttagatgtatattgttaagcaggcttaaaaaaatttaaatgtatacattgtgtgcatacatatgtacatatatatgtacatatatacatgtgtacatacatatcccccagaaagagtttctctgtgtagctttgtcaaggccaggctggcctcaaaatcacagagctccgcctgcctctgcctcctgaatgttggggtcaaaggcgtgtgccaccccccacccccatcatatacattaatttttaaggcttacttgaatttttgaaaattatgtgtatgtgagtgtgtctttgtttgtgtgtctccgtttgcgtgcagctgtcagagaaagccagaggcgtcagacctctgaagctggaagtacaggccgttgtgagcagccctttggggattgaacttgggtcctctgcaagactagtaaatcattgaacgatttctcaatcccaagcagatttctttgtaacaaagatatttaagcttcatttttctcttgctacattataggtttgacttattagaaattaagttggtgaaagccaaaaataaagaggaatattatgaaatgacataaagcctaaaaactgtgggagaagcgctgacaggatagttcaggcaaaggcttttgccacgtgagcctgatggtaggcgttcaacccccagatcccacgtgaaagtaaaagaagaacttactctacatgggtgctgcagcatgcgtgcaccccccaagacagcttgtataaacgtcaaagctattgaaagaaaagaaaaattaagtatatttcagagggacaataaaaatacaatagcaatcataatggccatttctgttactagtgataatacttcataaaaatgctgtggctaatgttgctgttatccacagggatatcggtatgtgtggtaagttaaatatgtaaccatgaaaatggtttgttttaaaaactagaggttatatatgtttctattgtaaaaacagaaattttttttctctttccactttattctaggtttctgttaaaataagcattctgacaaactgctgaagagagagccctgatagactaggtatgtatgtgtatgtgttttatatctatatctacatatttatgtaaatacacatacatgcatataagcatatgcatatacaataaaaccactgtacagagaagaatttgaaacttgttttcccatcatccaggacattgaagtatgagtcatgtcagcccgggccacataggaattttgaggttaaaagttagactgggtgacatggtaagaccttatttttaaatacaaatatacatacatacatacatacatacatacttacatacttacatacaaagaatgaatattgttcttgggtgaagaccttttctgagtgtttcggtctgtgtgtgttcatgtggacgtgcccatgcaggcacggcacatgaatgtagaagccagaggtgagtgtcgtgtcttcctcagtcatttttcagtttgttttttgagtcagtctctcactgaaccgggagctcactgacttgacttactgttcaccaagccccgaggctgccttcctggtgctgggagtgtgtgcgcctggcccttccctgtgggtctgaggatctgaatgcagacccccatgtttacatggtaagcactttactggctgagctgtctcacagctttcagtttttatttctattacagaaggacagaggaatttttggtgtgaatctagtcagtagattcttacagcagtaggtatacatagtaatggtnnnnnnnnnnnnnnnnnnnnnnnnnnnnnnnnnnnnnnnnnnnnnnnnnnnnnnnnnnnnnnnnnnnnnnnnnnnnnnnnnnnnnnnnnnnnnnnnnnnnnnnnnnnnnnnnnnnnnnnnnnnnnnnnnnnnnnnnnnnnnnnnnnnnnnnnnnnnnnnnnnnnnnnnnnnnnnnnnnnnnnnnnnnnnnnnnnnnnnnnnnnnnnnnnnnnnnnnnnnnnnnnnnnnnnnnnnnnnnnnnnnnnnnnnnnnnnnnnnnnnnnnnnnnnnnnnnnnnnnnnnnnnnnnnnnnnncccctcccctcccctcccctccctctttctttttttctgagacagggtctcattatatagcctcagctggcctggaacttcctatgtagaacaggctgcctcgaactcacggagatctgcccacctcatcctcctgagtgctaggattgtagagtaaatcaccgtgctcagttctagtttgtacgttgcaatacctactgtctcagttactttctctcttttttttattgttgtgatgaaatacctgacaaaagcaatttaaggaagaaaaggtttgttttatgtttaagaagatttattttattctttcttctgtctattatgtgcttgtgtttctgccatgtgattgtggatacctgcagaggccagaaaggaatgtcagctctcctggagctggagttatggaagttatgagccacttgatgtgggtgctaggtgcttactggaagactagcaatcctcttaaccactgagacattcttgcagctcagggagggtttattctggcttactatttgatcagcagtctgttatggaggaaaagtcactgcagcaataacttgaagcagctggccatgtcacagctgccgtcaggaagtagagagctcgctttctaccttttacgcagcctggaccccatcccagtgatggtgctgctcacagttaggatgggccttcctaccccagttaccttatccagagaggtcttcagagacctagccagtgccttgtttctttggtattctaggtcctgtcagttcagcacagtcttcacagatggtgaatcttactggcgttggacagctctccagttaggcactcagtcttgtctactcttattctcagctcttgattatcttgtgtacatttctgtagttctttaaaaacacaggagatctggtgtccaaaatgaggagagtagtaagccaagtttactctcaggactctgctgggcctagtggccttgattcacctttttgacttgttatgttagtattggattaccttaaattgaatgaattttaaatcttcctaatatctttgctcctagaggtaaaaccatcttaaaaatacttgaagtggaggctggagaagcacttcggtggctaagagcacttgctgcttttgtagagggcctgggcctgggttcagttctcagtaccagcatggtcgctcacaactgcctgcaactctggtcccaggggacttgacatcctcttctagcctccaaagcaaaaggcaaccacatggtgtacatacgtacatataaatgtacatacatctatgctggcaaacactcgaacgcgtaaataactccttttttttttaagatttatttattttatgtatgtgaatacaggcatcggattccattacagatggctgtgagctacccatgtggtttctgggaattgaactcaggacctctggaggagcagtcagtgctcttaacccctgaaccatctttctagcccagtaaataactcttaaaaagtggttaagagcacgtgtgctctttcagaagaccagggttcaagtctcagcatcaatacagtggctaacaactttagttaggggattggatgccctcttctggctccacttttattctacacacacaggcaaaactcgagtatacttaaaaataagtaaattattttaaattaaaatactttgaggctaaagagatggctcagtggttaagagcactgactgctctttcagaggtcctgagttcaattcccagcaaccacatggtggctcacaatcatctgtaatgggatccaatgtcctcttctggtgtgtttgaagacagctacagtgtacttatatacaaaaaataaatacattcttttttaaaaattaaactaattgggggaaatatgatatattttaaaaattctacatttaataattacaccagttgatgaattttcactaactgtaactacctgtccagaccagaagcagtaattaccagcacccttgtagcacctctgtctcgtcctgagccctttcttctcagggagactatattgacttagggactggttagatctgtatccttcccgctttttaaatgtctttgttggtagtaaccctgatccctctcttcctccctttcttctctccttctcccttcttttccctctttctttcccctctctctccctccttcccacttctacggtactaggaatagcagagctttgcacatgctagaatatgctatatctttatgtatatataaggattcatcattttatttttatttctatgtgtgtgtgtgctgtgtgctgtgtgtgtgcagttaccctcaagaagccagaagagggtgttggatctcttggaattgaagttacaggcagttccaggatacttgatataagtcctaggaatcaaatgtgggtcctttggaagaacaggaagctctcaacccctgagccatctctccagccccaataatttctgttggagacaagatttcaagctggccttgaattgactgtagagctgaggaggaccttgaacttctgttccttcttccgtcccctcctgagtactgggattatagactagagccactgtccctgctttgtgtttgtgttctgctggagatggcagttatagctttattcatcctaggcaagtattccactaactgagccctagccaagccctaatgtttcactttgaactaattttaggtcatagaaagtagaaaagaaagttatgaaggtaatgtaaaatatttgtgttggtcattattccacttccactagtgttaacacatttttttgtatatgttgtgcatgtgtgttttcatgtgtatgtatgcagcaagccccaggcatccacctgttgcgtcaccccctctccctgccagtgctacagttacagacgtgtgtttctgtacgtgggtgctagggatcctaagtcagatcttcatgctttgtgatgactagaatctcaccagcctcaatagtaacagctttacataactgttgtagagtcatgagctacataatgtttcagttagcagctgactacatacatgacagtggttctataaggatattatggtgattaaaaaattcctatcacttagtgatgtagtccattgtaggttagcactttattcatatattggtagagatgctagtcagaatataatgcatatagctgtgtataatacataatagcttgatagtgacaatgaatcatgataccggtctgtttgatgcattatgcgttttcatcttcattttagagtatctttattctacttattgagaaaacatatactgtaaaactatactataacgccttgttatgctgtccccagcctcagattttgtgttgatcatgaatgttaattgcttcacgtgtgcacattcatacacttgcaaatagtgtgtagtttgaaccatctaggtttgattagctctgtgatgatgtttcaaacagagacctaacaatacagttctcagaatactctttgtttaactatatatgactttgtaactaccaagagtgtaatggttaattttttttatttaaaaaattttaattttaaaaaattttgtggagctggtgagatggctcagcggttaagagtgctgactgctcaggttaaggtcctgagttcaaatcccagcaaccacatggtggctcacaaccatccgtaatgaaatctgatgccatcttctgaagtgtctgaagacagctacagtgtacttacatataataaataaataaataaataaataaataaataaataaataaataaatatattttttaaaaaattgtgttttagtgtctggtgcaggtgccagtggaggccagaaggtaaactggagttataggcagttgtgaatggctgatgtgggtgttgggaattgaactgaggtcttctggaagagcagctctcaatcactgagctgtctcttgagtttgtgatggttaattgtgatcaccaactccttcagattaagaagtgcctagggggagctggagtaatggctcagaggttgagtgttcatgttttactagaggaccagagttaagtccccagcaccctcaccaggcagttctcaagagcctgtaactccagaagctccaagggctccagtaccccacctctgttctctgtgggcacctgcacatgaagacacacacactgaaccagagctgttcaacagactgcagcaggaggcacaagagagtgccaggagtagctctcttcccctcttgctttatctctaaaactagtaaccgcccacagaactggtgaatgtttacatagccttgtctctttttacttttgtggtcccctctcttgaattagctttgaatttttagtattttctgttctggaagcacatattgtagaagggcggcgcctgcaatctaggctggccttgagcttaataaatagttgaggatggccttgtcctgctctgtcttctgggttctggaattgcctgtgtttgtcaccgtacctgctattggaagggttgaatgaatgtctgttgaaagtcaacttttttttttttttttttgacagacttcaatgtcattcaggcactttatagctgagaatagccttgaactcttgatcctactgcccatattccaaattctgggatcacagctgtacgccaccacacttgacgttgaaactcaacttttgaaaatgtctttatttccctaagttaaaaaatagacttaaaaaaaaatttctgtatacggatatgtgtttgtatgccctgtgtgtaaaagtgtctgaggagggcagaaatgggcatcagatctcctggagctggagttacaggctattgtgagctataatgtgggtgctaggaatcaaacccaggtcctctgcaagagcagcaagtgatcttaatactgagcatctctcgagttccccactggcattttgaaaaccaatttgctattatggtttgatacaaatcctcctgagtaccttgagggagttactttgtttctcctgttgttgagagatcttgtgtagtgtgtcattcctttgtagataatctgtttttctctctgcctgctttttggtccaaggttcaccccctgcccaatcccagggaccaaacccagggcttttcccatgctattctaggcagtcactttgctgttaagatatgaacctagtcctccactttttaaaaaataaactacatgtaacattaatttactatcttaaccgtttttaagaacacagttgaaccagctggtggtggcacatgcctttaatcccagcacttgggaggcagaggcagacagatttctgagttggagggcagcctggtctacagagtgagttccaggacagccagggctacacagagaaaccccgtctcaaaacaaacaaacaaacaaacaaacaaacccccagtttgtgttttccagtttgttcattctgttgtaaagtcaccaaccacagaccttctctagtaggtcttttatctcccagcactgaagctctgtatcagttaaataatagctccccattttattttccccaaggcctaacagtaccattttattttatgaagtcagcttctctagttacctcattaagtcataaaatgcctgggtgttttcacttgtgttaatgtccttaggcttcattaatgttacagcatatgtgagaatttcactctttttaaagctctttttaatgtattacgtttatatgttccattgtgattataaattcatctttcagtagatacttagttttttttttctacatcttaactattgtgattaatgctactttggacatgagtgttcaaatacatgttgaagcaggacatggatacatatatgttcatgtatgcacaagctttgatcattcttttgggtgtgagttggtatctcattgtggttttagtttgtattttctttttcttttcttttctttttttttttttagaattaatttttttattaggtattttcctcatttacatttccaatgctatccaaaaagtccccaatacactcccccccccacccactcccactttttggccctggcgttcccctgtactggggcatataaagtttgcaagtccaatgggcctctctttccagtgatggccgactaggccatcttttgatacatatgcagctagagtcaagagctctggggtactggttagttcatagtgttgttccacctatagggttgcagatccctttagctccttgggtactttctctagctcctccattgggggccctgtgatccatccaatagctgactgtgagcatccacttctgtgtttgctaggccctggcattgtctcacaagagacagctatatctgggtcctttcagcaaaatcttgctagtgtatgcaatggtgtcagcatttggaagctgattatgggatggatccctggatatggcagtctttagatggtccatcctttcgtcacagctccaaactttatctctgtaactctttccatgggtgttttgttcccaattctaagaaggggcacagtgtccacactttggtcttcgttcttcttgagtttcatgcatttaacaaattgtatcttatatcttgggtatcctaagtttctgggctaatatccacttatcagtgagtacatattgtgtgagttcctttgtgattgtgttacctcactcaggatgatgccctccaggtctatccatttgcctaggaatttcataaattcattccttttaatagctgagtagtactccattgtgtaagtgtaccacattttatgtatgcattcctctgttgaggggcatctgggttctttccagcttctggctattataaataaggctgctatgatgaacatagtggagcatgtgtccttcttaccggttggaacatcttctggatatatgcctaggagaggtattgctggatcctctggtagtattatgtccaattttctgaggaaccgccaaactgatttccagagtggttgtacaagcttacaatcccaccaacaatgaaggagtgttcctctttctccacatcctcgccagcatctgctgtcacctgaattttttatcttagccattctgactggtgtgaggtggaatctcagggttgttttgatttgcatttccctgatgattaaggatgttgaacattttttcaggtgcttctctgccattcggtattcctcaggtgagaattctttgttcagttctgagccccattttttaatggggttatttgatttttctggggtccacctttttgagttctttatatatattggatattagtcccctatctgatttaggataggtaaagatcctttcccaatctgttggtggtctttttgtcttattgacggtgtcttttgccttgcagaagctttgcaactttatgaggtcccatttattgattctcggatcttacagcaaaagccattgctgttttattcaggaatttttcccctgtacccatatcttcgaggcttttccctactttctcctctataagtttcagtgtctctggttttatgtggagttccttaatccacttagattttaccttagtacaaggagtagtttgtattttcttaatgattagtggtagtgagcattttttttcatgttcttattgggcctttatatatattgtatatttttttgtctgagtcctttgtgtttaccgtcctcccattaggtggatttggctgtgttgcccaggctggatcctgacttagaggctcaagtggtctcagcttcctatcagtagctgagaccacaggtattcttgcccattttaaaattgggctttcttattggagtatagttttaagaatcttttatatattctgaagagtaatcctttgtcgtgtgtgtgtgtgtgtgtgtgtgtgtgtgtgtgtgtgtgttcatgcctgtatgtgtgtatgtacatgcttgtggaggctggaagttgacattcgatgtctttttcacttttgtttaaccttagtttttgagacgaggtctctcacttaccctggaacaaccgtttgtctaggctggctgggcagcaagcatcagggacccagtggtctctgttcatcacactgtgccgctcactcacttcaggtaaaggactgacccagcgcttgctggcccctgtcagcatggtttgtgttctgttttgtttaaacatattcttttttaaaaaatatttatttttttaatgtatgtgagtacactgtagctgtgttcagacaccccagaagagggcatcagatctcattacagatggtagtgagccaccatgtggttgctgggatttgaacttaggacctttggaagagaagtcagtgctcttaaccactgagccatctctccagccccagcatgtttttgttgaacagaaattaataagtttttattgaatatagtttatccttttgtttgcctgggttttttgtttgagtgtttggttggttggttgttttgtttttgttttttaagtatttcttatgtagcccatactggccttgaactcagttcttctgtcttagccttctgagtactgaaactatacaagtgtgccaccatacctagctcagtttatcaacctttgtccctactgccatatgtacacgttttgcttattactttggtgtttcctgttttgttagtttctttatttcatgctatattatagtttttcctccatgggttaaaaacctttggtcatttgttgagactagagagtgaggcagtgggaacctggaagaactctgttcatgaaaagcagttagacccaaggcttagcacagcgtagtccagtcattgtaggtcttttccttgtgtgttcagttcttggaagaggaccaccctactcttttgtttatttgccactgttctagaagctaatgaaaggtgcagtgttgagtgtgagttttttctactctgtgatgtgataggaaatcgccttgtgtttattggtttctacatttctatccagtttaatgacttttcctttgttttgccttctgagatggtcttaggcaaaccaggctggttacaggtcctaactcttctgccactacatcccaggtgctagaattacaggactgtgccttcatacctggctatttctttaatgatctcttgtttcatgtctttttgttttagaactattttgtctgttttcattcttagtttctatatatctgatttagaattttttttctcaaattctgtgttttcttggtgtttgtttagagatagtgtctcacactgtagttcaggctggcctggaacccccaacaatcctcttctttcagccttctgagtgctgggatcatagggcactttctccccccactcccatggcgtatgttgatcatatttatctcctcttcccgtaatccttcagattcacctctatgtccctacccattcaacttttgtctttttaaaacgcatgagctccagttcctgctgctccagaagtggcatgtggggcttgcactggagtgtcagcctacctggggtcatgctcttaaagaaaaccaactccttccccaagaagctatccattgtcagtgtctgcccctaaggggactttgtgcccacctgtccctctccttgctaggattttgcctggctagaacttgggcagatcttggcattctgtgagaaccactgtgaactcctatgtgcgctgccctgttgtgtctggaaaacactgctcccttacagctctcaccctccagctcttacagtccttttgtcattccctcttcctctgtgatccattagccttgcagagaagggtgtgttgtgtaacagttccttggagagaaagcctctatcttggagggaagctaattaggaaagtaaaatattccatcttgtagggaagtgcattaagctcagaaagtaaacaacccaaaggtttcatggaaccactgacactgaccagattcagcgagctcttcctccccaagcttatataagcagtcaggactgctgggagatactctcagaacagctgagttgcttagaagactctcagagcagccagactcctcaaagtgatagtctccaacctgccaagctacttgcaagttgcacagtgaactccaggtttccggctttcatgagctgtggtgagctcttggtgatgtagctgtctttggagtcatttctgttcctttaattaaccccaataaaactcactggttctgccaggcagtggtggtgcatgcctttaatcccagcaattgggaggcagaggcagaggcaaatggatttctgagttcaaggccagcctggtctacagagtgagttccaggacaaccatggccattcagagaaaccttgtctcgaaaaaccaaaaccaaaccaaaccaaactaaaacaaaaaccaaaaaactcactggttcaccaggttgaactttggtagtatcctcactttgttttgttgatagttccttatctggggcaagtggatctttgttcacatcactccaagaattgtgtcacataacagattatatagatgtcccatttagagctgaaccactccttattctcttactttctgtttgttgactagatgtgggtctctatgcgttgaccagattagggtctctatgtattgacagatgtgggtctctatgtattgacagatgagggtctctatgtattgaccagatgtgagcctctgctattatctattatctgttgagaggaacagcttccctaatgagggttgagagattcactaatctatatgtatagcaataagtcattaggagtcatttaaatactgtgtccattcagcagaataataagagtagattttcccccaggacctatctagccacagatttttggccctataatggtgtcaaatatgggttctgtcttgtaggccttaaatccagtcatattgatacctgtattgcaccagtgggcgtgtctttccagggctagtttcctgggttcgtggctggagtaaggctgatgattctgttttgttttgcttttgctttggtagcacacatagcaccttccagcattgtgaaagttagcccataggtggggcttccaaggtaggaccagcttcatttctgtatgttttgtgactcaagtagtcagtgtcttcagaaacaggatttttaccaggaagttttgtagggtaactaagagaaagcaatgaaaaataaagtcagttataaaaaacacggatactgtatttgtataatttccctgctccttctcctcattttgtttcctcccatgttcccctccccactctctcttaaattgatggcccccttttgtctaatttgtgtgggtgtgagggtgtgtgtgtttccatatgtatttcctagttaggtttctgttctcatgataagtaccatggccaaaaaagcaacttgggaaagacggagtttatttcagtttaagttgtagtccatatggagggaagtcagggcaggagttcaagacaggaacctggaggcaggaactgaagcagaggctgtggaggagcgctgcttactgccttgctccttttggtttggtcactttgccttcttattcactgtgggtccatttgcctagagatgccacagctcacagtggtgtggggcctgccacatcaatcatctgtcaatcaagaaaactgggtacaggccagtctgatggaggcattttctcagttgaggtatcttttctcatctctttagcttgtctcaagttgattaaagaaaaaaacaaaaaacaaaaaccaaccaaccaaacaaacctaaccaacataatgtgtgtctctgtgtgtgaattaatgtataaatgcaacctgctaagtccatttagtagtattttctggatgtttttagggatgcccatttggtattggataaccaattagggcagctcacccctgggaagacggattctcccttttctcagctgtcattaattttcctgcagctgttcattggggccttgtgagatgtctcttcatcctcattgtcatgtgagctggtggagccattgtttgagttttgtttaagcagtcatattgtagaggttacataagattagcttctctattatgtatagaagacagtgtctcacacatagttgacatcctattcctctggtttttacagtccttctgcctcctggtccctgacccttaggtgtaggagttatgttgtagatgtatccactgaggctgggcacccacagatttctgcattttgaccatttgtgtctttctgtttgtgacgtctgtgaaaagaagcttctttggtatggagtcagaggtgctcttctctgtgggaaagcgctaagatgaggataaatagtaagaatgcagttagaaattatcctagtttgggaaagtggcagcagaaggttttgtttgtttgttttgttttttcgagacagggtttctctgtgtagccctggctgtcctagaactcactctgtagaccaggctagcctcgaactcagaaatccacttgcctctgcctcccaagcgctgaaattaaaggcgtgcgccaccacgcccggctagaaggttctttatgttccattttccttaccagccatgggtagttggcaaggtgtataatactaggcacaaagtaccttttattcagtgggctgttggttagtgtcaagatgtacgtaccactgttgaacttttggggatatctgaccatgctggtcattgtaatgtttcataagcataattttactctacaacagggtttcatatagcccaggctggccttacctctatagccagagatagccttgaacctctgaacttcttgcctctacctctggagtatcaggattataggtgtgtgccaccacatctgatttaacatctgtggtggggatagaactcagcattttgtatatgccaggtaaatattctaccgtccaagctacatggccttgatgtgatcctcaggccccttaaaatatgcaatagcataatatttttatgttgtttgtttgtttgttaaagaaacctgagcaaaccaagcaagtggcgcttagtggggcagaggcaggtgtatttctgtgagttctaggcagcaagttttaggacagccaaggctacataagagaccctggtttgaaaagaaagaacaaaaggaacctacagcagatacataagaaataggaagaccaggatgatgactgtttgcgcagagaaatagtggggtaggtggggaatagggaagtacagaaaggttctgggaagcggcatttcactgtctgtttttgttttttgtttgttttgttttatatcatttgacttctcttttttgccttgatagtatgttaacaaataaagataagagaaaattacatggtcaaatttctgtctcnnnnnnnnnnnnnnnnnnnnccatctctccagccctttaaaaagaatttttttttttttttttttttttttttttttttttttttttttttttgagacagggtttctctgtgtagccctggctgccctggacctcactagatcccttggaactagaattacagactactatgagctatcatgtgggtgctggggattgaacccagatcctttggaaggggagccagtgttttttactctgagacatctgtctagccctccccccttcccccacagccttgtctttaaaaaatgaatttttatgtcttatccattttacattaagagtaaaactaagctgaatgcagtgattgtgcaagtaatcctagcacttagtagggatagacaggatgtttattacaagtttaagaccagcacaagctacaaaatgaattctacatagcctagaatgaagaaattgagattctctctcaaacagtgaagttaaatgttctctactacaaatatattttatattataacttttaaaaattaccaaacacaagggactggagagatggctcagacattaagagcactggcagttcttccagaggttgtgagttcaattcttagcaaccacatggtggctcataaccacctataatgagatctggtgccctcttctggcatgcaagcatacatacaggcagaacactatacataataaataaagaaatctttaaaaagttatcaatcacaagtatgttgttttaaaatccttttgcttattgtgatgagactatgatacccagaattctacttgtagcttactgaaattccagatatgcgtatgtgctaaatatttgttttcattttccactgctaggttgtattgaatagatttttcatgtattttaaaatactgacacatgtatatatctcctactgtgtatgtatatacatacatacacacacatatgtgaactaaatgagcaggactcctggtcttatagaatttacactttagttggcagagataggccacagtctgataatcacattaataagtatattacggcaactcaggctatgctatgaaaagagaaagcagctaaacagtaagtagaagcctctgacctagtctgggaggaggaaaagggattattttccttgaggagggacatctgagaagagatctgaagaggaatttaccagagaaactctcagacagagaaacagcctgtacagagtccatgagacaggagaataagttatatgaagaattgtaaaaaggctattaaagtaataaagaagtagcccaatatgtgaaggaacttaccaccaaggttgatgacttgagtttgatcccacatggtggaaggagagagccaattcctttaacatgtgtgatgtgtcacatgtgtgcctatacacacacacacacacacacagaataataataccttttccacatttaaaggtagtgaaatgggatcaataaggtatatgggctatggttcagtaagaacctaggacacaatctaaacacaattacactcttagtatggctttgttatttattcattaatttttctgtttatgtatgtatttttatggtgctgggtattcaatccagagtctcccacatgctaagcaagtgctctaccactgagtttcatgtttttaaacttttaatcatgagaatgaatttaaaattagtaatgcaatgttctatttgatgaactttaatttcgtagcttcttttactggcactattagaattctgtcttatatgctgataaaagaagcctacagattgtgattgaagtgatattgcttgctcttgcctgaattttggttagcatattaccttgggtttatgttggagcctctaaattgtgactggaatgtaaaagggcttgcatgttgagaccatctgtgggagctacattgtctgaaagttgacaagagatcatggcagatggcgaggtcaaaagattgactttttgagcttgacataatgtgctcatgaagctggaagaagaacttatgtttttaactaacagaagacttggaaacaggaaggcgtgtgcagttgctgagtgtggataaacaccatgcctcagcacacatggctgggttatatctgagactcaccagtattgccaaagatagcaatttctgaaaacattcagtgtcccattatcttcttgacattttggaaagtttaaagccacatatgaaaaatttgcaggtaattttaacattggtcaatacaaaaggaaaacaaaatcttttaaaagcatttaagatacttaacctttttaatcgtaattgaaaacatttctttttttggtttgtttgtttgtttttgtgttttttgagacagggtttctctgtatagccctggctgttctggaacttactctgtagaccaggctggcctggaattcacagagatgcacctgccactgcctctcaagagttagaattaaaggtgtgtgccaccactgtccagctttctcctgttttaaaattgcagtttgtgttgtattttttatttttcctttataaattattcattacttactttggaagaagcagcatcaagttttcatgggaaatgagcactgatttcgccctggtgttgattgcttacactgtgttgggtagtgttttattaactttatatgtgtcatcttattcagtgtagtgtaaactgcctttaatacttggcagaaaatagaaattgaggtgcagaaatattatgatacattttttcaataaacataagctcctttggctttattttaagcatttattgtttaggcagcatttagagaatcagtctgtgccacactttgctaagatgatacagagaatactaacaggatcgcacgtggctctcaggttcattgatgtggcaaacatcttttttgttggttgcttcttacttggtgttctgaaatagttagattctgttaacttcctaattttttaactatccttctctccatatgatactggggatatagtccagattcctggtaagccctctaattattgaactacatctccagtctttcatcagtttctttttatttgcttgaacaccacagtgctgttcagtagcctagtttttaggaaatatgatacagtattgaatattgagcacagagatgaagcagatgcatagagacaggcagctgtagtcatttcagccatgctctgggctcagggagggagaaaaaaggggatccttgtagccagatctgctagctcacttcattagtatctgcttatgtcttgttggcagcattaagtcatacattatatggacaaaccatctgtgaggaaggagaagagagcattttagtgaacacattgctaccttcaactttttaagtgagaggaaaataatagggaataatatctacccagaatctgtacatagaaagctcataaaacttaatgagttaaaatcatgtcttctgtgggaaagacttaatttcctgtcataaatgtattttagtaggttataaagtaatttaattttttgttttctgttattgtgtgtgtttgtgatgttatttatgttttaaatattttagagtattttatttttgagaattttatatatatatgaatttcatatatatgtatgtgatgtatttcatatatatatgaatttcatatatatatatatgaatttcatatatatatatgtgatgtatttttaccattcaggtgctcttttctattttatgaatttctcttatatcgcactgagtccagttcatgctggctgtatgtgcatgggtgtgggaaaattgaaagagacatttgtacttattagtgtgtgtgatgtatgtgggtggacatggtgcagcgtgtatatgaatatcagagtaccactgtgtggagtcagtccctcctcctacctttgcctaagttccagggctgttcagtaaatacctttgccctctcatctgtctctctggtcaggtgtgttttgagacagggtctcatgtagctcaggctgctttggagcttgctgtcatccaaggctggcatttaattactgattttcctatctctacattctcaggtgtgtcttttttttttcttcttttttcattttgagtgcctttcttttaactctagtgctttaaaatctatattaaaatttaatagatttcacttctgttttaagataatctaatatttgtttatttagttatttttgagacatagtttcactgaatggattaggctggtctggatctcactgtgctacttcgtggcctaagctggcctcacacttgtaatttcccttgtctcaactcccaagtcttcatgttatggcatgagctgccatggctggtgtgatgattttaaaagaaaaattatatgaaactctctctccaaaaatcaaataaacacacaaaaatgagaagagctacagaggcagggtagagaactgctggacgcctttgcccagattcaccgattataacagtttatacctgctttattttttccgtttcctctctgtctcatttgaaagtaagttcttgttatgatgcctctcacctcctgaagtattccagtttatttttctccctaagataaaggatgtttaacatatagaaagaccctatagtttatggactaatattcagaaacaacaatgaaatttgggcctggttgcttggacctgtaatcctagcatttagaagactgagacaagagaattctagacaggccagaactcagtagcaaaaccctatccgaaaagaaaggaaggaaggaaggaaggaaggaaggaaggaaggaaggaaggaaggaaggaaggaaggaaaagaaaggaggaaaaaaccatacatattttagtatgtggacttttccagttatcccaattttgaattgagttttcagggttgtttgttnnnnnnnnnnnnnnnnnnnnagtctccactaatggaattgaggagcttaggccattattttgaagactagctttcactgtgtatgtccctgatagtttttatggttcggttttgcttgttggacagcggtatctcagaaatgatattgcatccattcagttcacctgagactcctgatgacttgtctgattgttgttggccatttagtaactctgatcactgtgtgtcagttttctttactggaagttttgtattaagatatttataagtagctatttcaatattatgttaatattttgttgcacatttctagtaactagtgttaacctttgttgatgattcttcccttaattggcttattatgatggttgtggtggagtttcaccaagtgtagaattcattatacttactagttggcattctattgatctttctactttcctctattatctcttaattttgtgctttctccatgaagccctgatgtttctttcaatgcattatctaaagcaacatagtatatctctgctgtatccctcgagagaagagctgacttgtcaaattacttaactgctttaaaaccccagtttttatctggaatggagataataaagatacatattttcatggtgctgttctaaggtttactttagacagttcacttgcaagtacatgtctcagtaagtgacgcaaacattgcctgttattacattgctattccctctctttccctttaacaggatattttaaagaactgttgaagacgaaggtttttatttttgtgtgttttttaatggctttacagaatattaaacagaatactgtttgacatgacggcaaaaaatgtaagtatttgtaatttttaaaaattactttttaaagtgagcctatgctgttttgctatacagattttctcactattctggttaacaaaattcaaaacattgcctagatttataattggttttgattgtgtggtgtgtgagataaacttaatactattgaatacagtatttttatggccattatcggattcttgtagtttggtgccaagttgttcgttttcaacagctgcaagtagctatctctagaaagtttccaacttggctcctcttctggggactgttacaaatttgttttggttgctagagagttacttggccttactgagcacatctctggtttctttggcttgtttttcccctcttgtgtttgctcagggaagtgtgtgtgctctgatgttgtttggaaccaggttgctacattctctgaggtgttccctcaagaccaactctagaactgttggaaaagttttagaattgcttcccttttttttgaattgtcatttctttatatctctattataaagatgaaggaatgtcttaggaatccacaactaggaatttagtaccccctagaaagatccgagcctcaaacctggagtctgtcaggaactgcaacaggatttgttttcatagttcactcctttctggatgttgtctatcgtcttcatttcttcctcctccccactgaagatcgttttaggtccatagctagcctctctccatcctttatctgcatgttagagagaggtatgcaggaagggaaaaaagcagtctgacaatcttttgttgttcccgctaattgcagactctttgggaaagtgtttctcttaggaggtcagagaacatttgtttgtgtgtgtgcatgtgtttgtgtctgcgcagttacctttgccttttagatcatagttagggtcagggataatgaaagtcctattcaaaagccttgaggagccagttatggaagtgtatggctgtaatcccaactactcaggaggttgaggcaggaggataaatttgaggcaatatagcaagaccctgtctccaaacaaacaacaaacaaacacaaccagtcatcacagcaagatcaaatgtattgacttgtataattgaaaagtctagatttctgtggctttaaatatctctagctttaaggatttaagaatgacatcatatagtctgtctgtgcgtgtgtgtggcccagtcccatcttttggctgtatgtatggtagcataatggcttacttgggtcctgtagtgccggtttataagaaaataaggaactttctatttttctattttttatcaattttaaattctatagaggcggtttgattactctgcttggctcacacacgggtctaaacagtgtgtgggagtaaatgggatgtcagaagtacgaggtctgggctgggagcctctcctgttcatgtttcttaccagaattacgcagggtataggatggacccttttgccaagggagtgagagataaagtactgacatatattctctgcatctcttcaaatagtgcttactatccaatgagtcctctaaaccaaaaacttaggtatatcccattttaagttaccctagtatacaaaagagatttttttttctttttgagacacagtctggctatctaagccaagccaaccactcaaactcacagtctttatgcaaatgtgttctaagtgctgggattatagacatgcaggaacatgcctgtttcacaaaagataatttgcaatataatccaaggtatactgttttttgctttgtcaatgaaactttttttttacatatttgttaattttttatagaaaatagaaggcaaaaaaaattagccaatagattattagcacgattttgttcaggaagatgtttagtatatataaatgcacagtgtttacatatttatcaaccaaaatatatcaaataaaatgaagttataaaccctataatgaatacttttgcttattttaatacttctgttacattttaagatgctgttttattttactcatggtatggataatatactagtttcctaatattagtcatggttttcccatttttaaatgtttttatcctttacaaaattttaaactttatttgttgattgggtgtatctgtgctaattgagtatatgggtgtatctgtattaattgtttggtgtgtgtgtgcatgcgcgtgtgtgtgcataggggtaggcattcacatagctacagggtgcttgtgcaagtccgagaacaactttttctggaattggttctcttcttccagtgtggctgccgggattgaatctaggtcaccagtcttgtgtggagtgggtttacccattgaaccgtctctctggtcatatttgtaatttgaagcagggtctttgtagcccaggtttgcattgcatgcttcttctgcctcacaaaccctcagactactatcaagcaccactatagcattgttgtccaagagttttgatttaagataggatctcattatgtagcttaggctgggctagaactcatggcagctgggcagttgtctggctgcagtcttccgactggtaggaagtgtgagccatctttcttggcctttaatttttaagacaggatattcctgcttctcgctttctaggggttatagggaaacaccccacatgtgacatcgaacattttgttctctttcgctcatttgtcagattatttctatcagacaaaaatctttgaaaattacaaagtcctatttctgagtatgtatgacttttgtccagacattatttttctcccattcttgagtagcagcagagagattgaatgttggacctcatgcatgcgaggcaagtgctttattcctgaactgtactctgagcccttgcttgagtcatattgctaaatggtgttttctaaagactgcatgtttatttacttaccagtaatatgtgaaaataacatgtctcttattttatgcgtacacataagtacacacacacacacacacacacacacaaatcttcttttcctctgttaaaaataatggaaagagaatgttgagggggcagtgagcccaacagtagcaagagtactatctacaggtttttatttttaatatttgtcattctaaccagcaaaaagttatatgttgtttctttctgattactagttaggttagttatattctatgcatttattggttatctccatatctgtttggaaattgcatatgttgaaactggaatctattggcatttgaataataactaaaacaaatataacttgaccataagcaaatatgcacaattgtttgatgtaaaatattcagttctgttatttacatatttagtttttttagttttttgagacaaggtttctctgtgtagccctgctgtcctagaactcactatgtagactaggctatcctcagacttacagaaatccatctgcctctgccttcctagactaagatcaaaggcatgtaccaccattgcattccaaaatcatcttgcctgtgaaagttagagtttacttttaggtacaaatcatctcatttgaattgttttccaagttatatcagaaatattaaatattggtacagtttgtaatattcttatttatgatttgattattaaaaataatgttattttatttagcatacatttagtgattattcacagattgtagtacagcattgtaatacccagatatcatttcatatatatttatcttatatcatgtttataccttaaacccattaaacttgtttaaaaaattttaaaagatttatgtatttatttatttatgagtacactgtagctgtcttcagacacaccagaagagggcatccgatcccattacagatggttgtgagccaccatgtggttgctgggaattgaacttaggacctctggaagagcagtcagtgctcttaaatcgctgagccatctctccagccccaaacttgtttaagttaattaagaaaatttatagtgaaatacctagggagaaggtatctcttatctgattaggcaaagagtataacatgagttatggattcttttttttcccctccttttgctcaaggaaatattctttttggttgttgttattgttgtggtttagagacagaatttcactgtgtagcttaggctgtcctggaactcactatgtaaggttggccttgatcttggcttcctcctaggtcagcctctcaaattctgggatcacagatgtgtatcaccatgcccactttagttccttttttattttaattaatccattttaagatttattttattggttgtgtgtgtgtgtgtgtgtgtgtgtgtgtacacgtgactatacatgtgcgtgtgtgcatatgtctgtggagaataggttgcaggatgtcttgaattggaattataggagattgtaagctccaccatcttgaatgctgggaatcaaatctgatctccgcaagagcagtgatcacttttgctcattctctctaaccttatgattccttatttgtctttttgaaacaggatctaactatccctggctagcctggaacttgatagattatttctctgctggtgaaatgagccaattcaaaccagatttttatattaaaggcaggtttatttagaaactgcttttgggtgatttcactggccccaaggattgaggccagaggaattgccaaggggatagaggggctaggggaggagaagagagagagagagagagagagagagagagagagagagagagagagagagagagagagagagagagagagaaagggaataagggtctgaggacagagagacagagacagacagagacagagacagacagacacagagaaacagacctaattgtctggattatatagggaggagcctctgagggaagggcacctcagcccctgggatggaaagttcaaggttgaaggcagggtatgacatgtagggactgagggatgctgggagaggccaggtctgtaaaattttgatatgtaaaatatccacctcagtctcttgcttctgggtcctaaccaagacagaactcaactgtatagaccagaatggccttaaactcagagatttgcctcccaagcactgggagtaagggctagtaccactttatcccagtccttaattcttttttaaatagaaggaaataatacttttgttgtttgtgtgtgtgtgtgttttgagacagggtcctccagagctctggctgtcctggagctcactatgataccaggctggcctcagactctcagatatccacctgcttctgctccttgagtgctgagattaaagactgtgccactgggccctgcaaagtgcacatgcctgtggaggccagagtcactggatttcttggagcttgaggtacagatggttctaagctgcctgacatggagctgcataatatacattcttaatcactgagccatttttccagcctgggaaagaatattttaaaatgtcttccctagccaacttttttatttttaagtactgtactttgagtctttaaactacaaagaataaaaacagaatttaatatgtactttaatttattaaatgggttttggcagtatttttaggaacgttaaattaataccttacttctaagataaaacttaggctgtcatagtgagactcaattggcctttatctaatttttaactgtacagttaagatatgggtgtaagtacactatagctgtcttcagacacaccacaaaagggcgtcagatctcattacggatggtcatgaaccaccatgtgattgctgggatttgaactcaggaccttcggaaaagctgtcagtgctcttaactgctgagccatcactccagcccccaagatatgggtgtctaagtttgtggatttgtttgctgcttacgctgcagaaacggcatgaagaacagtgttaaaacctaacagtaaccctctactgtgaacatgtgatttttgttgtggtttggtttttttttaaactattatttttataaaataagaaaaatgtaaatgactcttctgaagttatatgtatttaatattaatcatgggatgaatatattttaaaaatgtctgtcatttttgctttcttttcgaagtaggactgactaaagttttgttttctctttgtagcagaagtgcttgcttatgatgttgggtgggcgtcttagtaacgacagcacacatcaacagatgctcagttgcctaaatgtttaacgttatatttgtgagtagtacaggggagccatgatatggctgttggttgcagtgggggtttttgtttgtttgtttaaagctaactaaacttaaatctcagtgcaaagtatccacaccattacatagacttgagaagctagtttcatctcagtgtcaatttctgtcataaaattttgattttaggtgccatttatctattattcagaattactgggctgtgttaaatgtatatagaaatgttttggtaaaaagcaagttcacttagtaaaggattttaaccactgactaatgaaaccattagctcttaaactattcaattgtaatggactaagtatgtgcttatgaaggatatataatgtaaaacattacatagttttttaaaatagtccattgtgagtctagagagatggctcagcagttaagagaactagctgctcttctagaactcttgggtgtgatttccagcacccacatggcagcttacaactgtctgtaacaacagtttcaaaggctctcatactctcttcttgcctctgtgggcaccaggcacaaatggttcatagatgtacatacaggcaaaatatccatacatataaaataataacaaaaacttattaaagccaagtctacaaagttttaaaactttacatttaaaccttaaaattctttcaaattactgaagaactgatttgcagcacagtgatgttcattgttgtattgtatacttctaatttgttacatacttctaatttgttacattcctatgactgctttctcattgctacctcacagcgaatcttcctagttcatattcatggtctctctaccttctactccctctgtctgtctgttggtctgtcctccctcctctctctgggaccctctcactgggattagacgttccaccctattctcctattctcttctacccagctagttggcttatccttttattaaccaatcagagatgatagaaaacaatttttacataacactgagaccagagatgcttgaccttgcaaccagatgtctgggcatagaaatcagcatctgaatacacagtgcacaaaaccatcccccaaccttatgttatggattagaatagtttgtttcagaggaggggctgttcagggaattgaacccagagattttgacgtgtaaattaaaacctgctgagctatacaccagcacagattaatactaaattaaatctactcagtacatagactcatgcacacacacaacataccataaaagtaagaatttgttaactagcatgattgtagtgattatttaataatgtagacatggactgggccgtggtagtacgtgcctttaatcccagctcttgggaggtagagacaggtgggtctcttgagtttgacattagtctggtctacaggacagtcagggctacaaagagaaaccttgtctcaaaaaaccagtgatgatgatggtggtagtggtggtggtggtgggctggagagatggctcagtggttgctctccagaagccccagattcagttctcagcacccatatggtagttcacaactgtctgtaactacatttcttgggggatctgatgccctcataaagacatacatgtaggcaaaacaccattacacataaaataaaaaacttataaaaacaatgtagacatgtatcaaaatatcaagataatgatcaatagtttgagaccatatgagttttattacagtaaacttttaaatgtatctttgaaaagaagttttgaggtaccaaattacaaatttgaaatgttgaaagtttacagaatattccaagtttgtaatattgtaagactacaactctttagtgtataaaaccataatgtatagtaatgagtccatgtattataacttgctttgagttaagttgtttttgtacatttgttttgttgttgttgttgttgttgttgtttcttctacacaaggtttctttgtgtaatcctggctgtcctgtagaccaggactcagatattgagctaaataaaaaaaatattttgtgtgtatatggtgtgggggactatctgcatgccagggtgtacttggaaaggtcagagggcaacttggtgaaatttttccttttttacctttatgtgggtttgagtttgaactcagatcttcagtctggctcagcaagcactttatctactgagccatcttaatggcttgtgtgccatgttttcaaaatggggattcccctaggctctgaagcaaattttaaaattctgatggaaatcaagagtagtcatgcattcctgtaatttcagcgttctcaagatagaggatggaggatcagaagactaatcctcagctatacagtttgaggccagcccggggtatgtgaggctctgtatccaaaacaaaaaacaaatatttcttatgatactggcattttcatctaagattccaggtagccgtgtaaaatattatattaagtgaaataaaccatctgaagggagattataaacttacttgctgtagagattactgagacaaactaataaaaagtgaatgttgacacagattgaagaatgtgtgccgtgtactgtgccgtgtactgtgcatactcatccccttgggtcttcctcacaaccagaattagtaaggactggaagcacattctactttgccaatttgtaacttgaatggcttgactaaggcacacagcagtgggttctgtaatccagtgtggacccagataaatgacttgaggctgctgtccttgtacttagggtatttgtggtacttatgtggtagttcttaaaatcattgtgggaatgattaagagcatgagaaattaaggacagcaatgaggatgtagttttatactcttctttttatagtgctagagagcaaattagggcattgcacatgctaggcaagtgttctgctgctgagccaagcccccagccctagggatggaagtgtgatttatctgttggcagctgcgtattacttgccttcaaagtatttagaaaatttgtggattttgatttaactcataagtagcattccattaatttttaatctaaaattcgtagttttcccatttcaagcagcatttttcttttagtaacatattcctatggatgatataattagtttatttcataagactacatataacacttgatacagacttctggtggaaaatataaaatattttattacataattttacaatacttcagatcgagtattaatttttttttattcaggttggtttgccatccacaaatgcagagctgaggggctttatagatcagaatttcagtccaacgaaaggtaaggattattgaataaacatttctggatttaatttttttgaagttttcctataacatatacaattataagaattcctttgcgtataatagtacataatgttaggatgttatcacataccaactcgtatgtcagttgtctgtaagaggtagaaggtctttgtgtatctttttctctatctccttctttagtagtctcaaagccctagtgatcttattcctgttgacatgtttcaaatctacttttttttttttttggtgtggctatagttagtaatgtttatggagctgagacaggaggattgctatgagtttgagaccagtgtgggctttatacctagtttcaggctagtttgaactgtttcaaaaaccaaacaaaactagatgggagttaaaaggcccagtgggccccagctttcccatcatttgtagttattggctgattgaggaaagacaggaaggaaagacaattccttcagaggtgtagtgacgtgtcaggtgcccatgctcctgaaacaaccttaacgagagctattggatcaccaaaaaccaaagcattaaaacaataatgacagtaggaagaagactagttgggaaggggaagagattagaagaggtaggagggagataaatgctgtgacagggagacagatgtgattgacatacattttatacatgtataaacttacaatgaaatcattattatgtatcgttaatataggctagtaaaacatttaaaaattaaaaactttcccccaattttctactttcaagttaagttgtaagaaaatgcagttaaaaaaaaagtaatatatctgttttctaacagataaatttctgtaatgcatgactttctgggttacttacttaatatcagaaatctgactcaccatctaagaatgtaggcatacgtgatgaaatatttatggatgaaacgatagaatgtctgcagttagattcagaatagtctactctgagattagaacacatgacattacagataaagtgatattctttataaggtgattgagtattcagactgggtgacggctgtgtggggtttcattatttctctttcctgatttgtagatgcttgacattttccattgtacagactaagaacaaaatattgccactgtattccagttttgagaaaatgccagcttctttaaaagatttgtgtactgtctgagatgtgtcatagaggctactgaagtctatgcctcacataaaaatatctaacttagtaaataatattaatagtcagtaggagttactctgagagcttatgtgctattaaagtatttgagaaatactttaagtcttggtgcttctcaccccacccccatgatgtcatatacagaaaacggtaatagaaccattactggttactttttgaatgcactagggctaaacaaaaggactgttaaaagtcatacgtataatacctgggagctcatagccaccccaaaccataggtggaaggagatcactatcttttttgtttggttggttggttggttggttgtttgcttagttgtttggttggttcgtttttttgggatagttttgttgttgttgttttggtttgggtttttttttttttttttggtagccctggttgtcctggaactcatcctgtacaccagcctggcctggaattcacagagatccacctgtgtctgcctcccaggtgctgggattaaagatgtgcgccatcctcacccagctaggagacacttacagcagcagacttcctggtcctctgattcttagtttttctgtcctctcttccatgaagtcttgagccttgggtgcaggagttgtgttgatgctgagccttccgcaattagttattttctcctcattaatctcgtgtgtgtgtgtgtgtgtgtgtgtgtgtgtgtgtgtgtgtttagtggtctctgttgcaaaggatgcttctttgatgagagatgagaggtactcttatctgtgggtataagggtaagtattttgaatgtagttaggaattatgctggcttagtaaactggtggttgtagttttcttctaaagtccatgattttgttagactcaggtagtgatcaggcttggtgtcaagcacttttacctgctgagccattttaccagcccccatcaactcaaaccttaatttcatttttttgtgagttttttgtttgttttttcctttgagataagatcttgctagatagtccagtatagcctgaaattttctaatccctgttgttagtcaggattctctaacctctaagtttatctatcccaattatacttctgaacgtggaagatacccacaggttgagttcagggcagctggacctgctgtgagttgcacttcagccacagtgtgtcttaggatcttccagtattagtgccaattcagaaccagtatccagtggaccccagaaagtctgcttgtttcttttcttccagatgtatagctacccttggtaaaggctgaggtccctctcgggaagaactggagaaagtctaacagtaaaacttctaggtattttatcatccttcctcgggggaacttggctgtcctcactcaaggggtttgggtcagcaaattggctcaagtctggaaatgggttcacaagccaagattatcttttgccatgatccaatgtttctttcatttgtctgagaatttttctgcttatataggtcaaacaaaaattcagtagtttttttgtttttgtttttgttttgttttttttttaatctattgcatgcctgaaaataccatgactgtttactggtaccagaggtctctatgagtcatgctaccataaaattctctttgcctgtgctgaccattacaggtcaggcattgtggacacagctttgtctgacctgccatttggtgattcagtgctgccatctggcccctatgacctaaagcccaattaaacccattgcattgagttcatccaaccaagcaaaagttggatgcaaggaaaagggcatcaacgaagctcttcaaatgtgctggtgccctctcaccttttgcatcttacaggattggtgaagaatatgtcttctgggccttcccatcgtggaggattaggttttatacagagtacccactctagcattgcagtttccaccactttaaaatctctgcatcaatttattaagtcaggggatatcagccatcttcagtttttcagtaggccatcttttgacaaatgcttcagccaaccattcatacaaatttttgatccccccttttttttagctgtctaagcatctgtattaaacctagaatctccactaagagggttcatatcaataagctcagctttatccagttttatgtttcttccaccgttatcccaaacacttaaaatccgttcccacatacattccacagacttctgcttaaatgaattagcaaactcattaagctctatagtagtgtagcacacgtcctcatggctgcactttatactttacctctaggagcctgcttaaccttgagtctagtatataggtctagaggcaacaactggtgggccctgaggaacatcagtgttgtcttgcctggtatctcttaagagaaagtcacagctggtttagcagacaatgtagtattaattacctcacttaaccgtgaaaggggcaatattttcagaggatggggtgtgtatatcttttgctgaaggcagagactacttccttaggtgagataaactcttgagaatctgagggtttaaagttcttagcttcaatagcatcctcccacacatttgcatcccgagttacaggaccaattctttaccaattaatgctcttactttagctactgtcacctccaaagctgggacttgaatttttgctgtaattcaaccaactttataacgagggctgtggtttgtttttccacaacttgagctctgtgggtgctggagagaagatcctcttccaaggcacacttagaaaactttagactgtttatatgcccctgaagccagtcagttttgttactaagtccttcaccgtatcctgagaatctagaagttggttagttttatcacagagctagttcttttcttttgtcagtttatctagagatgctagaagaagccaagaaacagcagcattttccttatttttctacaacttgtcaaaagttttatattcctagttaccaaatctgttgccctcacagttggttaatcaggataatcaaatgcatttgtctcactgagtctgtaaaactttagtgctctctgagcgtgcaggagaacttgagtaactatagttgttggcgaattggaaagcctattccagatacttaaaatattcatccttctgttactctagaaccactactgctactaaaatctgtattctctagagtaacagaacttacagaatgaatctctctttggaaaagggacttattagaataacttacaggctatgatcctgtaagtccaacaatggctgcctatgaagaggagttccagcaatccaatacttattcagtccacaaggctgatgtctcagttggtcttcagtatactctggaatcccaaagtagtccctagtgctagtgaaggaatggatttgctagtgaggacaagagcaagcaggcaaagagccgaggcttgcttcttccatgacctttctataggcttccagcagagggtatggtttagattaaaagtgagtctttccaccttaaaagctctggattaaaggtgtgttcttctacctcaaagatccagattagaagtagatctcacaatcacatggactggctttgaactgacatatttttctgcttctgtttcctaagtgataaggttacagggcatgtgctaccatatctagcttcatttagcttatatacattttaattttatttgggcacttggaatctgcctcatgtatgtatggtttgagacttagtcaaagaatgggcattttatacacaggaggtgaagaattccttctgattgggtctcttctcccattttctaccatcatttttttttaccagacatatttgtctaaacttctgttttctaggtttttttttttgagccagggacaccatttttttttttatggaagtttagcagagcatatagattgatgctttttcttttagttaaaagtcataaaatatggtgaatatactatatttttgttgtcatttgatcaagcatgactgttgatctctctataattttagaaaatccaaaaaatatttaatgtggaatttctagttatctgcaataggattgtttggtgttattgaggcatccagcttgaagtgtgtgtgagggatgtctctgcaaacagcagtgccagcagagtaacaatctacgtgaggcaagaagggggtctgcttcagcaggactcagtagcctgtgttggttcaaacttcaaaagtctgacactgagcgctttattttaagcatatttaattacagtacaatttccaaaagcatttttttttctggtacacaatcccatgtgcgcaataaagcttaaggcataattacattgagactcatttgcaagttcatgtcatctcttccataaagatggcttctgttgatagactacatgtattatcctaaagggctggggaagatctggtgtggtctcatacagagagcaagaggtcacctaagctattaatcacctctggttctgtttgtaagactctggggaaaacagatgtggcctcagtcatagggtagttcagaggtcactagctattaaccacatccattcccagccttctgggcaaaaaaaaccccacaaaaaaccaaaaacagggcatacacctcttccattgaagagcctttaacacattcctggtttccctggggctgatctatgagctcaggggatttttgccttctacactcaaggactgaatacctactagtttctcaggtgtggtttagctgttgttactattttaaagcttatttaataaattcttatatgggtatatttatacatacatgcatacatacatacgtacatgctcacttactcactctaccctgtagttctgtttctcttgagaaccctgtctaaaacaaccatgtttttctcattaaataattggcctaccatgtaatactgtagtttttccaattgtcaaaatatgttccattcttttttttttttaaagatttatttatttgttttacgaatgtgagtatatactgttgctgtcttcagacacaccagaagagggcatcagaccccattacagatgattgtgagccaccatgtagttgctggaaattgaacgcaggacctttggaagagcagtcagtattcttttttggttttttgagacagggtttctctgtgtagctctggctgtcctggaactcactttgtagatcaggctggccttgaactcagaaatctgcctgcctctgcctcccgagtgctgggattaaaggcgtgtgccaccacgcctggcagcagtcagtattcttaaccactgaggccatttttccagccccaaaatatgtttcttatacttcaaaatactaggaacaaatgtaatatgattataactgtataaaatgactacagaaaaatatttgaaagaaatagttgttttacttttgtatataggaggtggggaggtagnnnnnnnnnnnnnnnnnnnnnnnnnnnnnnnnnnnnnnnnnnnnnnnnnnnnnnnnnnnnnnnnnnnnnnnnnnnnnnnnnnnnnnnnnnnnnnnnnnnnnnnnnnnnnnnnnnnnnnnnnnnnnnnnnnnnnnnnnnnnnnnnnnnnnnnnnnnnnnnnnnnnnnnnnnnnnnnnnnnnnnnnnnnnnnnnnnnnnnnnnnnnnnnnnnnnnnnnnnnnnnnnnnnnnnnnnnnnnnnnnnnnnnnnnnnnnnnnnnnnnnnnnnnnnnnnnnnnnnnnnnnnnnnnnnnnnnnnnnnnnnnnnnnnnnnnnnnnnnnnnnnnnnnnnnnnnnnnnnnnnnnnnnnnnnnnnnnnnnnnnnnnnnnnnnnnnnnnnnnnnnnnnnnnnnnnnnnnnnnnnnnnnnnnnnnnnnnnnnnnnnnnnnnnnnnnnnnnnnnnnnnnnnnnnnnnnnnnnnnnnnnnnnnnnnnnnnnnnnnnnnnnnnnnnnnnnnnnnnnnnnnnnnnnnnnnnnnnnnnnnnnnnnnnnnnnnnnnnnnnnnnnnnnnnnnnnnnnnnnnnnnnnnnnnnnnnnnnnnnnnnnnnnnnnnnnnnnnnnnccagtacaggggaacgccaggggcaaaaagtgagaatgggtgggtagaggagtggggggggggagggtatgggggacttttggcattggaaatgtaactgaggaaaaatacgtaataaaatatattaaaaaaatatataaatatatatatttatttatatatatataaatatatatatatttttatatatatatttatatatataaataaataatatatataaataaatatatatttttatatataaataattataaattataaatatatatataaataattatatatttatatatatataaataaataaaaatatatatataaaaaaataaaaatttttttaaaaaaaggaaagggtttctttgccttacaggcccatatcacccactgttggaaggaattcaaatggggcaggaacctggaggcaggagctgatgcagaggccatggagaggtgctgcttactggcttgctcagcctgctttctaccagcccagtatggcatgaccaacaacaggctgggccctgtcacatcgatgactaattaagaaagccctagagggttgctgacagcctgatctcatggaggcatttttaaaattgatgttctcttctctcatgaatttaacttgtgtcacgttgacataaaactctctgtcacaatttatcatttgtcaacgccacaaaaaaaaaatcaccattaagccacaaccttttctttctcattcatccctaagatctcattaaaaacaaataactttaaaagttatttacacgtttacaatgtaaaagtttttacaacttcaattcaatacaaattccagcagattgaaagtttagtgcagacggtcaccatgcagcgtgggcaggtggaagcaccccagaggcccagaggcccagaggcccagaggtgggcatcgccaaggtgaacatgcgtgtggtggtaagatgggagagaaagacaagcaaggatggtttgtgcaatgtgaagagagatggaactggagacatgagggtggtgaggaacagcatgatgtgagtagcctgtgtgccacttgaggccatggtgattactgccatggacggccatgtcttggtctgtagccctgcagcagcctggggctttattgatgtttgtggtccatgttaccaccaaaggttatgaggacattcctggtctgggctgccacctgtgactatgttgataactgagggctgtgtagaaatagccccacccctcgcctgggcaaagcaggatagctggctctggtgacaagtacacagaagagctggcaggctgaccaactcagctcccacccaggctgagatcccgggctttgagttggtccacccccaaatctacccaattgatgaactgctagtagttagtgaagggcagtcctgcggaagcaaagcttcaggatctccatgacactggcgacaacaggatatctgagaggagccctagagttgatagtgtagcagaagccaggggcctctaaccagattagtgactcattgcaatgaacatttgcaagtaaagctgttaggacagaaggggacactgtgtgacactgtgacacaccacagcttccactctagagatttgtctttgtcttttgagggaagtgtacaagggtgggtgtggatatgaagggatggggaggtgagtggggatgggaaattcacacacacacacacacacacacacacacacacacacacaaatcagtaactagtttttttaaaaagctcattccctttaaaatattcagtctgtataaaagtccaaaaactttatttttttttttgagactgttactctgtgtagccaaaatctctcaactgtgggctcctgtgcaagtcaaaattaagttaaatactttcttacttcaagagggaagaaccagggcaccaccacaatcagatcagcagaaaaccaaactctcaacagtatatatagcaccatgttcaatgtctgggatccacgcatgatcttctgggatcactttttcagctccaccctcagcagcctacagaacttattttctaagcttgggccagctccatttcacacctgtggtcctcctgtggtcctcctgtggtcctcctgtggtaccagcatcttcaaaactctgggatctttcactgcagctgttctgcactttcaccaacagcccctccaaggctctctttgtggtgctgacccttagcttctcggcatgcccgcccatgctcccccacccccacttcagtccttgtccttcaactaccactgaggcagaaccttcaccaatggcctcttctggcctctcacagttccaagcctcacctgctctccacgactccttcatgacttcaaaaccgtaccacctggagactcttagactatcaagtttgactgctattgcaaggcataaccttggccacttcggaacacgtcttacaatgtgatgaattttagggaacactcaccagatttcacctcagtgatgctggtctcttcttaatcactggtaatttttagctccagatgaccagcatcaattgtcctagttaaaaaaaaagggggggtgtattgtagtggttctggtctcctgttaaacatggctgattgttctgctccagctgatcagataactcagagtcttcacacaaatggcctagtggagtctttgttttcctctgacacttcacaagccaggcctttatcatctgcattgctctcaacattatctcccaagctccacagagctctcaacactcaatggattttctaactcagatttccaaactccttgcacagtccttttcaaaacatggtcaggttatcacatcaatattccataatgctggcaccagtttgccttagttcaggttactgttgctatgataaaataccatgatcaaagtagcttggctaggaaagggtttgtttggcttacacttttccttcttcactgaaggaatcaggacaggaactcaaacggcaggaatcaggaggcaggagctgatgcagaggtcatggcggagtactgcttattggcttgctcctcatgactggctcggcctgctttcttatagcacccaggaccaccagcccagggatggaaccactcacaatgggctggctcctccctctttaatgactagttaagagaagtggcctagaggcttgcctacggcctgttcttacggaaacattttcctaactgaggttcccttctctcagacgactttaaatcatgctaacttaacataaaactatctagtacagacggtataaagcacacatttgtctgtccacatacttattttgagatgaggtcttgctgtgtagctcaggctgtcttttcaactcatggccctcccccttctacctcaagtgcccttcactgtaccaggctgcattttaatggaattcatcacttgattgcaagttaagaggttagagagttttatcttattcattattgcattcatcactgtcctagaggacaaacatttcgaaagtcttatcttatagaatctttctcaaagtaggaacattgaaagaatttatgctatctacctgtaggtactttaaccactggccaaacgtgtatgtactcttgaaatctggctcagcccctccttgtcttgtgcactgtgtgccacctttggaccctgtacacactcatcactgccttctcacatgattgccattcattacggttctctaccagactgagagctccctgagggcagggtccggcttctcgtttcactttcagagtctcattaagagtctacagttagtaaatattgaactgtaagagcttgtttactgtaacctactcctagttcttatcacgtcatttaacttttgagaagtgaggtgtctcaagcacttacttttaaaacaaaatgttaatgtacttagtgagaagcatgtctgacctttttgttttgagacaagtatttctagagttggaaggttaaaagttagttgtacagttagggcaagactgaggctcattatatgctccccgtggtgagtggatagcatctgcagcacagatagatacactgggggagaatccaagatcggacgtattacctccttctggatttgagatacttttgtaccacagttgacttcttgactgtagttaattgaaagcatagaagtgatcgtatagcctgccaccctgggaaagccattatttgttctagtagctcttctgtaacctatattgccatgccacccgggattaaagacatcttatttctgcatttccgttgtttctttcctaatttcactggttaggtctatcaattgctcttatccttcttaggtttgaagataggatctctcattaaacctgaaagtcattgatttggctaggctggcaatgattgtgtgataggatatttttagctcattaatatggtaagttaattgggtaggtttttatatttcataccaaatttgaatttcttaggtaagaccatttagttacctgggtcgtgtctgaggcctgtgatccttgcacttgggagattaaggcaaaagagaactgccataagttcaatgttaacctgggcttcagacagagactctatctcagcataacaaaacactacccaacagctataaaagaaatttctaattctgcatttggggtattgttgagtaaaacctttattgttgttgtgtttttaatcctttattatcttaagagatgattgtgggagaatcattgaatgctacttaaaagtattattagtaattctctaaccttggctatcctgagactcataatgtatgccagactgtcctccaactctgaatttggactgcctctgcatcctgcgcactctgggattagaggtttgcactaccatgcccagcagtggtcagagtcgtaacaaatgtggtgatgtggtgggttacatagatagagttccatggtcagttcagcagatgctgatctattcctgtgtgtgtgcatgagagagagcatgatctcacatagcctggactggccttgagttttctgtgtagccaacagtgtccttgagcagtctcctgcctccacttcccaggttctgggattataatcatgctatgcccagaaccatattcttttctttatttgataaatcaagccctgagatacttagtactaaagtttctgctttattttgtactactttgaggaatagggaaatagcatatggttgctatttctataacagttccttggcagacttctgaagataaggtcatgttagggtgagtttggcctcttccttactgggcgaggcttggtggaggttgtattttagtgaacgtagtgaatggatctggcttagtccttgagtctgtatttggtttcaagatattttaaaatatctcaatgatttgaacatagactcttgcaaactattctacaagtagtcttatctatggacctattcactgtagtcttttcctaaaggatgtgatctactaatttcctcacttatattttctgtttatcttcaagataaagtatattgaaattacaatgataggtctgtcatgttacataactaaataatagaataaatgagaattcacttttggaagtgaaaatcgagagccagatatagtagcagctgctagtaatttttacacttgaaagtgtgaggcaggaggatcaggtatccaaagtcaaacttgggttacagagttagacctccatctcaaaaagcaaaacaaacacatataccaaagaataagagaaagaaaagaagatccaagcagattccaatttaaaacaaaagattttaaaaaagaagaagaagaaaagacctaagtaaaagagactggtcactcactctcttctctgttaactgctttcatggcttatattggggtgggtagaattatgtaatggtctagtttttagccatatattctagaggtataaatacaagagtccttttgtttgcttgtttttagatttatttattctgtgtgtcttgcctgcatatgtatgtgtacatatgcttgcatggtacccaacgaggtcagaaggtgtctgatgtcttgcaactggaattgcagatagctgtaagcttccttgagcatgtgggaattgaacctggctcctccacaagagcaataagtgttcttaactgctgagccatttctatagccctttagataactttggtaatgtagcttgttattgcttggcccacaataaagtgacagactggctgcccctccccaggaattatagaaatacaccagcctctgccttctgagtactgaaataaaggtttgtgcctgtcttttgtccttttcttttctttcaagacagggcctcttatagtatagtctggactttgtaaccgaggatggccttgaactcctgatccagtgctgggattccagggaggttctgccgttgctgaacttcagaaagttttgtgctagtatctttcagtttgacagtgtgcccaacttgcttatccactcacgagttgaacactggtcgtatttccaactgtggttgttatgagtgagactgctgtgagcttcaaataaacgtttatgtgttgacacacgttttcattttccaaaggtaaataaatacctacaagtggaattgctgggtcatacggtaagtatgtgtttaactttttaagaaatcacaaagcatgtttcccaaagtatttaagttgatatcccaattagcaatgtttttagtgtcctttctactgtcctttgaatggtcagggattgattttgtttgctttctttattctgttaaagtgaatttgctatctcaagatttacttagccttccttactttttcttggtttgaggaccagtgttagaaagattgttttagtagttcagagcatgggctgctcttgcagaggacatggctgaattctagcacctatgtggcagctcacaaccatctgtaactctacttacaggggatctgacactttcttcttagtctccacaggcacttagtacacacatggtacacagacacatgtaagtaaatactcctacacataaacaaatttcagaagtatttatttggaatgatgtacatttatttggaagtaggcacaccaaaggcatgtaaaacacagagcaactttcaggagttagttttctccttccacctcgtgggttccagtgatttaactcaagccatctgccattggcttactttttgagtctctccttaccccatccctttctctttgaaatagggcctcacacatcctaggctggtcttgagcttactacattgctaaggatgaccttgaacttttaattcctctgcttccactgctagagtgatggaaatacaggcaggtgacaccgtatccagtttatggtgatcacagtaaagctttgtgcatgcaagtaaggcactcttactagctgagctacagcctcaaccccttccttaattttgtattggcttgtttatcttactgtttaattctggatatgagtctttatcatatgaatataacaaacattttctcctatcctgttacttttaggtttgaactacattcttgaagagcagttatttttacgttaatgtaaaatttaccaactaaaagtatgctttaaagttaagcatgtattacatgcttgtaattagaggcagaagtaggaagacctagagtttaagaccagcctaggctacacagtcaattttaggatattctgggatgcatagccaaattgtgtcttgagacaaaagaaaatatgagcttattttactaacactttctcctacctttttatttagaagttttataattataactcatttaaatctagtaaagttttaactcatcttgtatatggaatgagatgagggataaattttctatttttacatgtgaatatctaatgatttcagtattatataatgagaatactccacagtgctggggcagtgaggtgggggagttgtaaaggaaaaaggaagaaagcaccagcctaccgagtgtagtgactgctgcctgtaatgctagcgcttgggaggataaggcaagagcatcacctcaaggctggttacagagtgaggccctgtcttaaacagacagattgcagggcagggcagcagaggcaggtggatctctgcgagttcaaggcaagcctggtctacatagcaagttgcagaacagccaggactacacaaaaagatactgtctcaaacaaacaaacaaacaaacaaacaaacaaacaaaaagatcaggctcccgaagaaagtttcatgaaccaaactaaagattctgagacagaatatcaaggacaaggtgtacgtgcaaatgtaaggaagtgggctctttctgtttagctgcttgtagctccttgtgttgtaaagtcttttctatagctcatttctttctcctgcttttctctctaattaccttagtgaccatagttctctatacacatagtgtatatccatatgtaaagaaacgactagttggaagtagcagagaagacaatcagtaaacggtgtgcatttttttcaggtctgtcttagttcatttcatgtggctataacaagatacctaaatacttaataaaattaagaggtgtatttaggtcacagttttggaggccacaattgcaaaatcaactctggccttttggtaagtctgcaatcatagtataccagatggtaaaatgacatgtaagaaaagggggaggaagagaggcaaagagggaggtgggggaggaaaggaaggagggagggagggagggaggggaggggaaggaaagaaggagggagaatatgaactcagggcaagataagaaggaagggagttggggagatcaagtgtcatctttttataatagtctgttcacacaagaattaagacctaaccattctttgaggccagcgttgatgagatttgagcctataaaccaactctgaaagttttcatcccttagatattgttatttctttccagtgctatattggtaaccatctttcagcatatgatcattttggggacacaatcatatctaaactaaggcaaagtcctatacaatataaactcagaaagctttttgctgtagtgttaaagcaaatggattttgtttgttcttcaaaggtttatcttttaggggcctgtgcaatgcctcagtgggtaaaatgcaggggcctaataacagagcttagacatgaaatccacagtggaaggaaagtcctgaagcttgtcctctggaaccccagatacatgcaatggttggtacatgttgtgaaagcatgtgagagaatgcatgtatacacacacacgcacacacacacacacacacacacacacacatgtgggcacgcacaccccaaaatttaagagtctggccgggcgtggtggcgcacgcctttaatcccagcacttgggagcagaggcaggcggatttctgagttcaaggccagcctggcctacaaagtgagttccaggacagccagggctacacagagaaaccctgtcttgaaacccccccccccaataaaaaaaaagtctttggcatgagttcattaagaaaaagttatgaagggagccctggttagatggcttagctgtttttcctgttttcaaaccagggttgactaataactgtaactctaatgtcaggggatctgatatctgtcttattttgttttctttttttctttttctttttttaagatttatttattattatatgtaagtacactgtagctgtcttcagaagagggcatcagatctcattacagatggttgtgagccaacatgtggttgctgggatttgaactcaggaccttcagaagagccagtgctcttacccactgagccaactcgccagcccttattctgttttctatgggtactgtatatacacggtgcacagatacatattcaggcaaagcaaccatgcacataaaataaatcttcagaaagaagttcatttgttgaaaccttaatcttaagcagagctttaagacttcaaacctaatgaagtcctagatcatttgaagtgcttcttccctcaaaaggcaaaatattctcctgaagtctgtcctttgagaatgaaccttggctgtctttggcgtcattgcttcctatgtgaccctttgctcttgtgtctgtctctgccattgctagggatgagtgggtggggcagtgtagctcagcctaaacagttcttttccaagacccccactcaggtgaagtgggcattcatgactgcatcacagaaaaagttctgactgagtcgggatgaagcagaggtgaagtctaagaagagatttttacatcatatgtgcacgcacacacatacacacacatgtgcacccaaacaagagtaaaagaaaggtgcttaggggaaacttaagacacatacaggtgtggtgtgggcttttcaagggcaaattttccctaaaggtctgtatagtagtcatctataccattttggtggcttcgatagtttgaaacgttgaaatattgctgagaaacttaaatgagttgatagagtgatttctgacatgcattatataggattacagttgataaagaccatgggtcagagtattgtgcaagaagtaaagatgatttagtgtagcaggcatgtcctgcatacagctgagggtcgctgtgaatctgcctcaacataaggaaaacatacctaaaacatgatgagattttgatttggtttggtttggttttgaatcctagctttcccgagctcacctggaactcactgagtagctaaagatggccttgaacttccgatcctcatgcttctacctccagtactagaattacatgcatgcaccaccataccgtgtttaacattatgagggtttgttgttggtttttgtaattcacttgtgcatttcttttttttttaatctaattttttattaggtattttcttcatttacatttcaaatgctatcccaaaagtcccccataccccccccctcactcccctatctacccactcccacttcttggccctggtgttcccctgtactggggcatataaagtttgcaagaccaaggggcctctctttccaatgatggccaactaggccatcttctgctacatatgcagctagagacacgagctctggggggtactggttagttcatattgttgttccacctatagggttgcagacccctttagctccttgggtactttctctagctcctccattgggggccctgtgttccatccagtagctgactgtgaacatccacttctgtgtttgctaggcaccggcatagtctcacaagagacagctatatcagggtccttttagcaaaatcttgctggtgtatgcaatggtgtcagcgtttggaagctgattatgggatggatccccgggtgtggcagtctctagatggtccatcctttcgtctcagctccaaattttgtctctgtaactccttccatgggtgtttcattcccaattctaagaaggggcaaagtgtccacactttggtcttcgttcttcttgagtttcatgtgttttgcaaattgtatcttgtatcttgagtattctaagtttctgggctaatatccacttatcagtgagtacatattgtgtgagttcttttgtgattggtttacctcactcaggatgataccctccaggtccaaccatttgcctaggaatttcataaattcattgtttttagtagctgagtagtactccattgtgtaaatgtaccacattttctgtatccattcctctgttgaggggcatctgggttctttccagcttctggctattataaataaggctgctatgaacatagtggagcatgtgtccttcttaccagtcacttatgcatttcttgagtgtgaactttgaagataacatcacaatgttgcagttaaatggttagacatgcttgtgagtataaatgaaagttgatacttttgtttgtgagttcccagaatttctgataaagaaaaaggataaggtcatattatatagttaggtcttaagtatggtccaaaactattttaactcttcttatttgaaaatattcatatattaaaggaatattgtctttatgtaggccatcttcacaggaaatgttaattgtgttggtattatttctttttaattattttaactgaactgtgtgcttgtttgtagtatgaatatttgccggtcccgtatgtttacatattgaatccagagggtaacatcaggtcttttccttcattactttctagttcttttttttcttcgtcttcttctgaagctccttccctgattccctctaaacttcctgtctctctgtcctgcctcaccacttcacttctgtgagggtcccaaggcctgatatgccaggtgcttggcacctccagaacttctcagtcaaataaacctccttaagcctttataaaacgtgcttgcttcatctatttccttgtagtaatgaaaatgaactggaacatacggaattttttcaaaaaaaatatatatgtgtatgtatgtagatatatgtatatgtatatatttatatttgcttttttgagacagagattttctatgttgacctctagctgtcgttgaatacattacgtagaccagtctgaccctgaactcacagagatttgcctgcctttgtttcccaaatgctggagtcaatactctttgttgttattgtttctttaattttaaaaaataagtatttttatttgtgtgtgtatatatatgtgtgagtgtgaacgtgctttcacaacatggtatgtatggggagatcagtagataactatgtcagatctcttattctacagtgtgtgtttctgctcatcatgttgcccaggctggccccctgactccaggctcttgtagttttcttgcctggcaatcctgagtaactggaattaaaggaacagtgaccttgccctaattactagttcgaacaaaattggttaggctcttgttttgactagggatagataatactaaggtcaaagtgcccgggactgccagttatatgtgtatctaacagaactttctgcagtgagggaaatgttctatatatttgcactatccgttaatacactagtagctacattttgaacacagtcttagttaggatttccattgctgggaagagacaccatgaccaaggcatctcttaaaaagggaaacatttaattagggctgccttacagttcagccccttatcatcatggtggaaagcatggtggaaagaataaaaggatgtgctgatttgagatggacaacaagaagtgaactactgagagagataagtggacattttgtgcaggcagacgtgatgctggaggagccaagagttctatattttggtcagaatgctgccaggaggaggctctttccacactgggtgtagcttaagcttaaagcccacccctacagtgacagacatacttcctctaataaggccacacctcctttaataaagcctcactgtccgtggccaagcatattcaagtaccacaaacacctggcacaaaaaagtgaagcttaaaaaaatgtattgatatttatgtatatgtgtgtatgcccaagggcatgtacatacaccatgtgaatgcaagggcccacagagatcagaagagtcattaggtcccctggaactgaagttacagatagctgtgtcctgccatgtggtgactgggaaacaaacccaagttctctacaaggacagtcagtgctttcaaaccactaagccatctgaaagtgaatcctaagtttaaattttaacctattcaaatattcaggttggtttggaacttactccatagcctcagcaggccttggactcatggcagtctgccctcctcagcctcctgagtgctaggattacaggtatgagcgaccatgttcatatataaggaaagaatcactttcttctttgtgttgttttgttttgagataggactttatgcagcccagcttggcctcaaacacataatgtagcctaggatgatcttgaactcccagttgtcctgcctcgcctcgccagtgctgagagtacagtgtttactaccatgtctagctaagagaatctactttctttgctgaatattggtgctttaacaaggttaagagaataaaaggatgtgctgatttgagatggacaacgagaagtgaactactgagagagttaatggatatttagagatatacagtgctgaccaataaacagctgtgaattaaagcttagagaagaatggaaaagcccgggagatcattaaagaatttagtagtcatctatgtggaagtgatagatgccctgcagaagaggagtacacatttttaggaaaacagtgttgtgtccccacctcattgctatgacacacatctgaagtacttcaaagagaagaggagtttgttttggctcatcactctgaaggttttagtttataactgagaaaccagtagtggtgcagtgcggcaccggcatctcagaagctcattcacctcacagttgggaacccaaccttcagggtttggtatttccaaaacccatttaaaggtgtgtcttattaggcccttatctaaaacttgctggcacctcccaacaacattactggctgaccaagattattgtggttgttgttgttgtggtggtggtggtggtggtgggttgttcttgttgctattattattgttgttgttagcattttgtctaagctccaccccacagnnnnnnnnnnnnnnnnnnnngtgcctgactcactataaaagggatgtttgccccctcctctctctcttgctcttgccttcttgatcccactctgtcctcttgccccttcccccccccctttctccccattcacacccccactccctccatgtactcatggccggcttctacttctatactcctcttctttggtcggtctctctctctctctctgtgtgcctttctctgcctctactaccctctcaactcccctccccatgccctgaataaactctattttatactcttatgtggctggtccctcagggggaagggatgcctcagcatgggcccaccaaggcaccactttcccccatacctaactacacattcaccaagcatatcccctctctctttatccttttataaacacaataataataataataataataataataataataataataatataataagaatagttactactattactattattattattattattattattattattattattattattattatagacagggtctctttatgtagccttggctatcctggaactcactatgtagaccagactggcctcagactcacagagatccacctacctctgcctcccaagtgaacatgtgctactatgcccagctagtaccaaagcttaactttgtgcctttgagggaaagtataggtgtgtagatctagactctagcaaacatcaagggtagaaccttggaagatgccctcactaaaaacaggacatagagcaaacaaaggtaatctgtttactatgtgacattgaagtcagtattagctgggtagtggtgcatgcctttaatcctagcacttggaaggaagagacaagtggatctctgagtttcaggccagcctggtgtacagagcaagttctagaacagccaaagctacacggagaaaccctgtctcagaaaagaaatcaataaagaaatatttattcaagcaagtagtttcatggatcctttggtttggtcttacactggttaagattagacattgtaagtgagcaagcacaagctcaagctgactaattgccactcttaatgtggccaactagcaatctgtgagtatcatcctacctataaaatcacaagtctgtcattaaatgtgaatagttagtcatgttactagtatacataacaaattcaaaaaaatcaacatacaaacctagaagagaacaccatctggtgttctctagtcagtagctgaaattaatgatacataaatagatttaaactttttttgtgtgtaggtcttttggctgcacatatgtctgggtaccatgtatatacggtgcccacccacagaaaccagaagagggcatcatattccatggaattagagttagagatagttgtgagccaccatttgggtgctggaaaccaaatctgggtcctctggaagagcagtcagaaccttaatcgtgccagttctctaacgtcaaatagagtttatatataaaagattaagaagaaatcgttgaagaggattcttcaaagcttttaaaagtacaatatgtatatgtgtgtgcatgcgcgtgcacacacacatgtgtatggattctataaagttttatcttttgttcaaaaacatttgaaatctgactcgccatataaacttagttaactgaatcaaacaattaattagttaattaatctgttgggagacagggttgttattctgtgtagccctggctgtcctggaactcactgggtagaccaggttggccttgaacttggggatccttctgcttcttcctcctgagtgttaggattaaaggcttgcatcactattgcttgccaagttttttaaatgaatctttttcatgtgcattggtgtttttgcctgcatgtatctctgtaagggcaccgtatctcctggaactggagttaaagacagttgtgagctgccatgtgggtgctgggacttgaatccatgttttctagaagagtagccagtgttcttaactactaagccatctcctcggccccatcagtgaacttttaaaaaattatttatttgtatgcgtatgtttccatggaggccagaaggagggtgtcagctctcctggagatggagttacatgcagttgtgagctgcccaatatgaatgctggaaactgaacttgggaaccaaacttggtccttagaaagtgcagcaaatgctcctatctatcactgagtcggcctggcccccgtccattgaatgttaatagattgcccaagtacagtaagtaccctcactgctgtactttaaggtataagaatgaaaagattcagagttctataggttgtagtttcaattttttaaaacatgtttacaagacaagttaactcataccctgtatcatatcattgttggcacacgtctgtattttagtgtattatgtgttagcaaaagacaagttcgaataagaagagttatctagtctctttcagtcagtattgattggaatgtcagacaggtagtgtctaagatgctgaggatacagtactaaaagcaaagcacaaaagtcttgccttgttgtcaagaaatacatccaaaaatgtatttggtggctcagtcctttcactgcaacacttaggaggctgtgataggatttctgcatgttgtagtgcagcctgggctacaaaggagcctgtcccaagcaatatacaaggtcagttatatttgaactttaatattatttgaactgtccagctctgggtagagagaagcaagcaaggaagcaagaaacccttttcagagggggattcttccagtgtaggtgatgcgtatgtgataagagacagacagacaccttagttatgttggattgtggaactcactggcagcggaaacatgacatgccagtaagtccagtggagacagggatttaattttgacttttgaatgttttcactactactgtatacccaggctctaaaatagcacttggcttatgatcaatattcagtaaatacatgttgatgaaattgcttgttttagatttacatactcacagatacctgctttaattttttttttttttttacatcttggcagttggaaattttattttcattgccttatttgtaatattattgcaataaaagtgtattaattttggtagctaatcttatggttatctgacattacaaaaagtaaacttggaaatgaactttaaaaggtcatcttttgttaaatttcctgtgttggaaaattgagtaaaatgattaggtatgtaagtaactttaattaatcatttaaaaaaaaggtcaacataatttttgctctcctgaaaaaatggaaaaaggtacttaaccctggatgtaaaaaactaacccaaaacgtttaagactaactgtgggaaagtgggagggcgaagagcacagctaagctgctctttgttgatatcagaaaccagcctgtcattcactttggcgttgaagcatggcctatctcagggggcaggaccaggactcttccctcccacaagggctgggcagtttctgcaagctcagagagctctgagcagtttttcaggagtttctcctccccttttactgggaaattcatggtgcatttgctctgctttcaaaatgcggtaaggtcttctgctttctgactgactgccttggagccagcagatagtcggacatgtacaattcgaattatgcaggtcttgtgagtaagttaattttatttttaaactacttaaaattcagatggcatttagaaaagtgatagcttggatttaggcattttatcattttttttacctttaagctttttttttttttttttttttttttttttaaaattttaaacagcctttgtaatttagtaagaaagccaggttccatacagcaaagctcctttcttagcacctgtgttttgaggttttgggatgtgcctttctttcttgggcagcagcacacatcttgaccgcttttcttgagcatcttttagttttattgagtattttaagttgagcttgtctgagctcgattgcttacgtctgacacagtctcaagtttccagtgaatggtaacaaagactgtagagtgttgttggtactgcagtgagaggcatgcttccttagaccaggtaagagaggccagtttgtttctcatagcctcgtgagtttttactgtgtttttatttgttaagctgctgccaggctaaatagaaaagtagccaggaacatgctgatttcaagacgtccttgctggttacagatagaaaaactacagagcatgggggggaaggtggggggaggggtagttatcctagtttatcctcagctatttatataaattaattacaatgcagagataattctgggattcagttttttctatttaggagttaaagaagcagttgaagacatcagtcattttagaggtacttcatagttattcctcgtggaaacaattctagtggtagtttttactttcatttttttccaataaataaaataaggtttcctcttattaaatattttcccatttatgaaaactttcaaattgtcaacaataaagtatgcttcctcagaatctttagaaatcaacctgacagacgaaaaaaattcagcctttgtagttatttcgttccttttttcccctagtacaattttcttcaaagtatttgtgctttgaaaatgtcagctgtattctaatgaagctccggcattgtttgctcataaaggagccggtgcattccactgcttgacggtttattatgaggcgccgtgggagagggggtggcaccatttggtgtctgcctcttggggtggtgactgccattatgttagctttggattggcaaagaaaatatagcatgcaagaagctatacagactctggatactgtgaagaaaatcctgttcctaaacaatttttagccgcgaatgtgtaacagcttgattgagctgatcatttcaagtatacccttgaagtctatattatggttacaattcatattctgtgaagcacatatcttgtttttttaaacattattctttttgctttaataaggaaataaataattttttagctgtaacattttaatggctatgacaatattttaagtaaagaagtctaaggaactctgtggggagggagggggagttggagaggggcagagccttcctttcagtgaggaaagccctgatgaggaaaatgaagcaacagatgtttcttctgttacaattgaagttgtttcattcaaaattcaacagtagctgaaatgaggagagagagggggtcataaatccgacctaaatggtgaataaataaaacagccatttatcatttatttaaaattcatcctttatagtcaggatttgagaatcaacataacaaaaatgagtatacatttttgttaaagagttttttaaaaggaaaccttaaaagttgtgtaatgaaaacagttttagtgcatttaagttataggaaatagaacattatattagatttaactcttaaaaccaaaagtcaaataaaatatatagaaaatgcttagttgcagaagtttgtaattgcaaaaaggcttcgaatggagtagagaaccccagttgtgcatgttgataggccatttctacaggaaacatgagacctacaccagagactctctggatgaaaaatatgggagacatgtttggataattgaagtgatatgtttcactttgtctgaaaaaaatcataagcttaggttggttgctcatggaaaaaagggtgatgtttatttgctggaaagagcaggaaggaagataatatgaacataatgaaagcagtcgtatactttttaaaagtaaatcagattcattatgaataaagtataaacaagtaacacaaaggggaattctgtgttcttatataattttcacttatacatattatagctactctttttggggcggggggacctatatggtcttatatgtagctcagtctgttagaactttggaggtgggggtgggggtggaggcaggtacaaggttgcactatgtagctctgactggcttggaactcagctcgacctccctctgcctctctcatgctggttttaaagacctgctagttttaaaggtgtaagccaccatgctgggcctggcctagaactcttggtcctcctgcttccgtccccagagtgctaagataatagaaatatgccaccactcccatctaactttatgggggtcttttagccttggaagtatttagtgactgaacctagacatgaatgctaccctgagctgtatccgcttggcctttatatttttcttaaagtttatactgggctggagagatggctcagcagttaagcgctctaactgctcctccagaggccctgagttcaatccccagcaaccacatggtgactgtaatgagatctgatgccctcttctggtgtgtctgaagacagctacagtgtactcatatacattaaataaataattaaaaagattttttttactattattaatgggatgggccatgaatgccatagcatatgtttggagtcagctctcttcccccaactttattggctcctggaccctgagatagaactcagatcatcagccttgaggaaaaaacactgtacccactaggctatgcatatcttgggcctccttatatttttcttaaagttagcctttttgtttatttgtttaattttagattggattttagtttttaattttttgagacagggtttctatataaccctggttgttctgaaacttactgtataggccaggctggccttgaactcacagagatccacctgcctctgcttcctgagtgttgggattaaagtatgtgccacgacaccaggcaaagttgacttttgaaaactggtgctaaagcaccagatctttaaaaaaaaatttatatgtataggtgttttgcccaaatacatttctgttcaccacttggcattcctggtgctcatggagaccagaagggggcatcagatccctgaattctggaagagcagatagtacgcctaaccgctacgccacctctccagcgccagcaccaccaggtcttttatgctaaacatttattattttccaaatcttactctgtaacgttagtagtaatatttagttgccagaacatctttagctacactttgaattttatgcattggtcaaatattatgtagcttctaaatatttaattggcctaagaagactggaaataacttcaacaataaaggaaaatattaaaaaaattttcttgtttttagctaggatctgtaggtttccttgaaggtattcttcaaataaggatgacagactttagaggctttgaagtttatcaactgattgctctaattaagataaaattctaagattgatttacatactctttaaaggaataacaacagcaatcttgatcaaagaatataaatttcagtgaacaaataacctttaaaaaaagtgcttggcctcatgtagaatatataactgtaatagcatttttcatgtacttatatttgagtaaagtatattttaagtaaagtatacattaagtatatttaaatatacttaaatactttttaatttacttataagataggctcttttgaagttgaggctggcctcaaactgtgtatgtaagtacaaccttgaacccctccactgcaggtatcagtgtcgattttgtagtgcagacaggatgccaggtcctgcagtaggaaagcagcagcagcggtgcagaagtcattggaacgtcaacatttcatgtgaagtctaccacataggtagtagaaagcacatcagctgaattatcttaagatgaacacctgctatctctgtaggagtgaattatacaatcattgtgtgttgtacatataatgtgtgtgcatgtatgatatgtatacatgacaccatatatatgatgtacagagaaccttgtggacgcgttctctttttctaccttcatgtgtgttcctgggtctgaactcagcttgtcaggcttgtgtgccaaatgtttttgcatgctgagccatcctgctggcctacatttatttatatttataatatataggatatatgtgtagatatatatcccccatatatctatctctacatctatataccctatatctatataattgtatatatatacagagtatatctacatataccctatataaaaaacagtttctattacactatagagttatatcctttcatttacttataagacaggctcttttatagttgaggctggccacaaactatatagttaaatacaaccttaaacatctaatactaactgcttccttgttagggttgagattacaggccactactctcagttttatgtggtccagatgtggaacccaggatttcatgcttgttaaacaagcaccatacagcagtttgcttattgagacaaggtcttcttctataacccaggctgactcacgatgtagctccgaaataatttctttatacacatatattccttaattcatattcattcatattctctttccatctctatatatctagtagtctagaatggcctcagacttactatatagttgaagatggccttgaacttctgatccttatatgttcatctcccagatgctggggtaataattgagctctactacattcagcttgtaaatagaaaactttacttttttaaggcaaggtctcgattaataaccttgccagcaccaccaccccccaacaaatgaataaagagttcaggctggcttctgacttgccactgtcctcctgtttcagcctccagagtagtaggattgagatataggcatatgtcatcatcctttaatttccaataagctctaccacagttagtatactgttcaaaacatgtgatgatagaagactttaggaataagatgtgcttgtggctttgtcttcattgtgaactcttcatcataaaactaatatcttagagaagccatgtttacctatttattatttctgaagtcagaaatagtatcctcagagaccaattgatgtagttattctcactatcttacataggcatatacaacttggaataattgatgactgcctatgaattcctcattggtgggataggggtaagagggaaatttttcatgctgtttatgtttcttattcaaataaaccttttacattattgttcaggaatacatagatactatatttcaggtagctttttttttaaatgcatacatggacactctgtgtgtgtctatgtttgtgtgtgtgtctgtctgtgtgtgtgtttgtatatacataatcatgttacataacccatgctggcctttaaagttcctacaacccttctgccttggttttccaagtgctgggattacagatatttgcagccgtgctggtgaggacggacccaggagcttattgtatagtaacactgttttctaccaacagattttcaagtgaatttttaggtgacagctctaaacatggaatctaacaacacagtactttggttttggtaaattactcacatgtggtgaaaatctggcagatttttgatgctacaaaacccacggacttggagtactttctgtgtgctagtaagaggggcactttttttaaaaaattattattattattattattttgtttgtttttgtttttcgaggcagggtttctctgtgtagccctggctgtcctggaactcactttgtagaccaggctagccttgaactcagaaatcctcagaggcacgcctctgcctcccaagtgctgggattaaaggcgtgcgccaccactgtccagctaaaaaaaagttttttaatgtatgcgagtacactgtcactgtcttcagacacaccagaagaggacatctgatcctgtatagatggttgtgagccgccaagtagttgctgggaattgaactaaggacattcagaagagcaggcagtgctcttaaccactgagccattctccagcccgagaaccttttttcttaatgttttattagtgtatattaattatacataatggatttcattataacatttttacacatgtacataatatatcttgatcataattatctcttgcctccaacttacctttgtatctccattgctaattctaatccctttcctcttccctacttacctgccttctacacacccacctcagtttgtctgcgtgacccagtaggtttccttagggttgtctacagaaacataaatgagggtttgtttacaggaaacatgtgcaccttacaaagtggctgtattgctggaaaaaaattctttttttttttaaagatttatttatttattatatgtaagtacactgtagctgtcttcagacatctatatttattatatgtaagtacactgtagctgtcttcagacactccagaagagggcgtcagatcttgttacagatggttgtgagccaccatgtggttgctgggatttgaactccagacctttggaagagcagtcgggtgctcttacccactgaaccatctcaccagccctggaaaaaagttcttgttctactatcaaccattaagtgtgtataaatcttcagggaaagataagagagatagaacttttaaaaagattttatatatatgggtgctttgtctacacaccagaagagggcattagatcctgttttaggtggttgtgggtgctaggaattgaactaagaatctctgaaaagacagtcagtgctcttaaccactgagccatctctccagtctcagagacagaatttataatgaaagtatgcaactgagtttggcctggaacttgctatatcctcaaggctggtctcaaacgcatgatcctgcctcagccttctaattactagggttacagatagattatggaaatgtgacagcctaccgagaatatcatttaatgcagatgtgggttctctcccccttaatatgttaaaatgaatctatagccttgtataatctagtcaagaactctgaccattgagatacatcctttttcacttaaaaaaaaggttgtgtttgtttgtttgtttgtttgtttgtttgtttgagctggatgtggtggtgcacacctttaatcccagcacttgggaggcataagcaggtggatctctgtgagttcaaggctagcctggtctccatacgaagttccaggactacataatagaccttgtctcaaacaaaacaaaaaagtatttttaaacatttgtcttgtatgtttctgtctgtacatgagcatactatgcacatgtgtggaggtcagagaaaaatgtgtttccatggatcaaaatggggttggcgggtatttcagtccatcaaagcatcttgctggcctcttaccttttaaggaaggacctcagtaagtgcttaggcagacctgcaaacgtcaatcctttggactcagagtctctagtagctaggattgcaggcctttcacgaggcctgggtatgaataagtttttgtacacaataaattttgttgatgttgatctataacaataagatttcttgctttttgtagtcttctaaaaatacaggactggcagaaaggctctgtgggtaaaggtgtttgccacccagcccagcctgatgagttttgctttctagaacccatgtggtggaaggagagaaacaactgcaagttgtcgtctgatctccatgcttatagcactcctgcaatgaatgtatgtatgtatgtatgtatgtatgtatgtatgtatgtatggtatgtatgtatgtatgtatgtatgtatgtatgtatgtaaagaactgttgctataggaagcttcaatgatcttcctgtagtgtagatcttcttgtcagtgaggacacaaatagccctcagaagtctgagtgacctacttaggacactatggatcacagtgatcccttttttattttctaaggagaagaaatgcctatgactcctaattcatggataattttattctgttttgaacttatgtcctaaattagaaaatttttagatcccaactttttaatttaagatctatttctaattattctaaacttttataaatagaaaatctcttacttgagtgtaaattaagaacgatttatttgtttatacaatctggatgccatctgagaggaactcataagctttgtgagattaatttccaattaagttttgagcatttttacagccataagttctgatcctgtggtcacacccagccacctccatctcctgcagccactcagtggctgtttgtctgagataaaacgcgctgctttctgttccttctcttcacggggcctaggaacaaagctaacttgccacagaatggttagagatgggatgagcattgagaccctagaacatgtacaaagggattggagacacggattactaagcaagcaccttctcttttataaaagtaaattcagtggggtagaaaaactattattttcttaatttgaaacacagtagttcttcccaatcagttgaagctcttttaaaaacatgaatttctacttagtttttggctcagtaggtgtccagtggatccctgaaatgcattttgaatgagaactcatgtcaccactccctgtgcagtgcacagtgtaaccagacacatagggaaggacagttagaatggactaggtgagccaggctgcaaatgatgtaccaaaataagtattaatcaggctgatggaagagacatggaaaattaagaattaagtatttctaagactgaataagataatagaaaaaagaacaaaatcacgttttgactaagtataaagaatggagtgaagaaggaggtacagcagactactggtgggcgaggcaagtgtttggaggagagtgactttaccatgttaaagcgaggactagacgtgtgcctcgtccttcttaataaacctttgtacgtgtactagtggtttgtaagaatagcatgcaatcagaaatgcaactgttaaggagtctgtgactgtgtgtgagcgtgcctgcacccctatccctgtctgcgtctccatccgtcgacccacgtataatgtgtacttcagattggagaacaaaagtaatcattattactttgacctccttcattttcatactaaaaaaatttaagagaaaaggtttataaagttgactacttccaaagcaatatgtggagaattaaatataaaacaaaacctgtcgagtatggtggctcatcctgtaattccagtgcatggggagctgagacagaactactgggcaccaaggcaaggtgggtctcaaaaaggaaagggaaagacagacctgctggctcacaccttgtaatcccattacttacggggggctgagtgaggcaggagagttgctgggagaacagcctgggctatctatctagttttaggaaagactaaactacgaaatgggatcctgtctcggggaaaaaacaacacacagcaaaaactataaaattggaaaaaacatttgctgcaagcataacaaaataatcttattccttcattatttgaagagatcctacaataagtgactaacaactagtagaaagacaggagaattcttaggaaaaatcattatatagcttttattttgttggttggtttgagttccccatgtagctgagaatggccttgaatgcctgattgccgagattacagtgcactttcagatacacacacacacacacacacacacacactctcacacacactcacactcacacacacacacactctcacacacactcacacacacacacacacacacactcacacacacacacacacacactcacacacactcacacacacacacacacacacacacacacacaaacacacagtggtaaaaagtgtagaagttaggacttgtaagaatctgttctactgttttcctcaggggaaacctggctgtatgtgcttttatttgctaagtcgtcttgctagttcatcctttgtattaccttaaatttatttattgattgattgattgattgacaaaaatctcactttgtatcccattttgacctgaaattcactatgtagcaaatactggagttgaaattatttcaactcgagtgctgagattataaacttctatgcccagccttttttgtattcttccttccttgtggttgttgtaaataataggttatatctacttaaaatatatgcatgcatgcatgtgtggcacacgtaggccagaagacatccacttctctggcgaatggtttgaacatatagacacgttgtttagtgcgcagtgaagcaagtgcctagcctctgagaaccgcttgaaatggtgggaatgggcatggacataacaagaaggagcgagagctgcagatggtacagtctttatataagaacttaaggcttttttttttctgtttcaaatgtcattttattgcaaaatggtataactaattacaggtttaaactataacttggtaattttagtcaggcagcaagtggctacaaattgcttatttaaatgtgatcactatgtaactctggtcttattggccaatagggctaagccactaacaatttagtggctcgttcatttcttaggaaaggtatactgtaattttaatagacagcaatacaggaagagttcttaacaagttctcacttaagttaactctctctggctgtctcaattgaggtagacacattcacataactggctgcacttgagcctctgcaggtagctttagctcttcagtgcacttggcaatggtctccttttcctgctgtgtagaaatgctctgcaccacatgcttttccaccagcctatcatatgctcttgctccttgtacagaaatatggtagtccaggcgattcttttacctccttatatgctcatctagctgtgcctggcaagagacctccacagacaggacagtgttattcctctgaacatagtctgctttcttatacaaccgagctccacccatgggctggttccattagcatttgtaattaatcaagaaaatgctctagaggcttgcttacaggccagtcttatggaagcattttctcagttgagattcctgttctcagattctctaattgtgtcaagttgacaaactaaccaggacttggatctaaattcagcaatttaatccagaggaacatcagactcgagtgtatttaaaggcatgaggctgagatcagtttatccaataaggaaaggttgataagtggggttggagaactgaagcctagggcttcagaacagttcagagaggaacgccagccatcaacaactggaatagccagttggctaggagaagactaagaggcttgacccaattgccaaatgagaaacaacgtttcacaggatgtagtaaaatcatgtacaatgctgagaggttaacttgagttgaaagttaagacttaatcttggattcagcaacatggagatattgataagaactatttaagtgaaattttaaagaggaaaatgggaaggggttcaagagaatcagcaatggaggaagtggacactgtaaatgtccatagattttgagagtagtttgactgtggaggtcaagaggaatgggttggtagctgtagctcttagcattaagtggcagaaagtaccttcgtgggccttgcaatcgatctaacacaagaggtttattggggggagagggacaaaggggacataagagagatacagacagaattgggagggggcatgatgtcaacagggtccttttaaaggtgtgcaagttgcctaggaaaatatgaaactcacaggacagtggaaggaggtgccccaaacctggctgtgatggtgatgatgtaagctgctggcactgagtcacattatgcgtggctaagaaaagttggatttttttgttttgtttgctttcaagatagaagaaataatgtatgtttgtgtgctgagatcgatccagtaaagtgaaagattgttctgattcaggagacctttaaagggactagagtaacatggtgtagacaagtaaataaattagctggcttaaaaataatagagctggttgacaagtaaataaattagctggcttaaaaataatagagctggttgaagtaacagataaggaaaagctaagagaaatgcatgacctatattacactttttactaataaacataaatttgcttataccattttccctttaagtcaggtcttcctatagaccaggttggtcacaaacttgctttgtagctcaagatgtccttgaactcttagtcctgctgccctcaggaagtgggactatagccatgggtctctacacctggctttctccttcattttggtatataaaagtataatttacagtccagtcagatggctgatgggtgaaggtacttaacgcataagccaggcatccaggagcccgtatagaagtgataggaaagaacggattacacaaagctgtctctgagaactccacacaggtgccatgatgtgcactcaacaccccactaattattattaataaataaatttttaaaatatataattaagccgggtgtggtggcgcacgcctttaatcccagcactcgggaggcagaggcaggaggatttctgagttcgaggccggcctggtctacagagtgagttccaggacagccagggctatacagagaaaccctgtctcaaaaaaccaaaaaaaaaaaataataataatttatatgtatatatatatatatatatacatatatacatatacatatatatataaatttaatgtacaagagaattagcccttcttagattggacttttagttccacaaacaccataatgttggtcccactttgtttgtggcatggtcttactgtttagttatggccactatagaactcataactcacagcaatcattccccttagcctcaagggtgttgacattacaggtgtggactctgggccaacaagttatcaccttaaactgtgtttgtttgtttgtttgtttgtttgtttgtttgttgagacagagtctctctgtatactcatggaactcattatgtaaatcaggctggtcttgaactcagagatctacctgcctctgccccccagatgctggcattaaaggtgtgcgtcaccccacccagccaatttatacttattattaagaactgtaggttggtttagactgggaaaccgaaacctctgcgtgcagattttttcatatttatggagattttatttcctttatttgagaaacttttttctctttcttttctttttctttttcttttttttgggggggtgttttttcgttttttgttttgttttgtttttcgagacagggtttctctgtgtagccctggctgtcctggaactcactctgtagaccaggcttgcctcgaactcaaatccacctgcctctgcctcccaaatgctgggattacaggcgtgcgccaccactgcccagctttatttgagaaacttaagtcttgggtcaatcaaaaccaatttctgggatgcggggacaaaaactgaagtttaattaagctagtaacttgtacactattctatagaggaacctctactctaaatgtcatcttaccctggaaacttgtgccgagcttctgtggtcaggtgttggacaggcctctgggcatctcataaaacttctctacttgcagctttacagtcaatgaacgaggctgcccttactgtgttttagaacctagcttagtctcttgcataaaattctaaaaacgcatcagcccacaattaaaaaaaaaaaaaaagttgttatctgggccacaacagaacccagagaatttatataattgaaaaattataggtgcttcataattgaccttctgatccaaaatgacctattgaatttgcaacttggttcttggtgtggaggtccacagacaaactcggacgtcttcagaccttagctggatgccatgaggcgttatttggctttcgactctttttttcttgtctaagaggtagcagcagcaacagtgcccacctccgggcagcttctttcttggcatgatgagcctgcatgcagatttttttaaaattacatttatgcgtgcgtgtgcacatgtttatatatgcactcattttccttttaccatgccagtcctgggggtcaaatttaggtccttagatttagcaacaagtaccttaattcactgagccatcttgcctccaattctagatccttccactgtaatgtcctataggaggattacaggaatacactgccatgtacatcatcaatattgagaaaataaagatataatttaggctgtttgataggaagtttggcatccagttagaaaacttagggaatccagtctgggctgataaggtttgtatgtatttcaattaagactttttggtttttgtttattttgtttggtttttccagatagggtttctctgtatccctggctatactggaactcattctatagactagactggtctcaaactcagagacctacctgcctctgcctcctcagtgctgggattaaaagtgtgctctactaccccaggtatactgtgtctccaaatgtagattagtagaatggaataggaccgcgcgcgcgcgcgcgcgcgtgtgtgtgtgtgtgtgtgtgtgtgtgtgtgtgtgtgtgtgtgcacttgataccgcaaaagactgacttcttacttacctgtctttcaggtaacatttcacttgttgcctttccagtttcaagcaccaactcaccaacaaagattttaccgaaaaccttagggccaataaatgtgaatgttggaccccaaatggtaagaaaattattaaatttcagaattgacacttttctcaggcaagactaatttatagataattatgctgaagatgtttgatcaaatattctatttaattttagttatctcatttaccctaaataaaagttttggttttatctcagtataattaagtattaatttatattaataaatgtttttgtgttcttatgtttaattttaacatttcaatctgtgggttctgaatgtgtaatattaaggtttttctccccttacgaggcctttcttaacttttgttgtttaattaacttgaaatctattgtattctaccagtcttacaacttttgtggaaaccatgtgtgcacatataaattgagttataactgagtagttgaatttatacttggagttatagatttcaggtttttcattaaattaaatgattaaagattattataggtaaactcatgcgtgtactcacattttgggaggcagaggctggaggatcaccacaagttccaggataaccagtctatttagtgagttccaatccagagaattacatagcgaaaccctgactggagagagaggcatggggtagagacggggagagaacagggagaaaggaacttgcgtgcttacaaataaccaaggaagcaactgtgtgccattttaattctcaaccctaaaattactggatgaaaaataagtatgtgtatgtttctttaaaagcattattcctgctagagcttgaaatacgtagtcctctcagaaaaccttgtttataattacatttgcattagattactctgaccaaccaagtgtagtggcacgtgcctataatcctagcacttgggagacagaggcaatcggatctctgtaaattccaggccagtctagtctacaaagcaagttcaagaacagccaggactagtacaaagagaaaccatgtctccaaaaatcaaaacaaaacaaaacaaaatcactctgctcaggtttgatggttcttgcctgtaagccctgctcttaggaaactaagcaggaggatcttagtgcatttgaagccaggaggactctctcaaaacacctactacaggggactaaagagatggctcagtccttaagagcactgactactgcagagggactgacttgatttccagcccctatttctgaggctcacaactgtctgatagtcaggggatccaacaccctcttctggcctccatggcatcaggcatgtaagtggtgcacagatgtacatgcaggcaagatacccatacatagaaaatacctaccgttaaaaacaaacagactaacaaaaaaagtaaaatatcttaaatcttaatatttttattttaaattatttatttactgcatgtatacatgtgcacttaaacacatgccacaacatacaacatgtgtagaggtcagataacttgcaggaataggttctgtccttccactgtgttttttccaggaatcagaactcacgttgtcgggcttggtgacagtgccttcccagtgaatcatttcaaatacgtaaatattaaagagtaattctcacttacagaacagtaccaatatattttgcttatgacacagcattctgtggactattttgaattcaaagtttaaatagaactatcttttaacattcttactggtttcaggaagtctttaaggtattataagcatgacatttcctagggtcagttaaagactgttaatcatctgaaactttcaagttaaagataaaacacagtttactgtaagtatgtgaagaatgtgatctagctctagaccccatagagactcagataaattgtccccacttggaagtagctcaggaaagattcaaacagtggttcagcatgtgcccttctctcagccactacagtagatacagataagacatttagctaaagtctgtactttgaaatagaattatgtaaatactaaaattccttagtcatcacctgtgtggctctaaggtgccttgtacagtgcaggcatggtagtcactccttcagagggtacagatggcaccaccttggtagcagtatccatgcgccatctccactaggctacagaatgctgatgccacttagattttaaagaacctttgagggagcctcgaggactaggtagagaactattgctatcgccactgaaaagagacctcattagaatgctgaggggaagctatggaaatggggccaccctcaaactaattgccaccagcaataaacagggccaccaccttagcaacttgaatacttcccttggaattttaaggactttactggggttaaacctgaatttatagtttctaaactgaaaagaattttaggcctaattagtgtataaagcagaattggagattttattatagatactgtattttgatagaattttatttgaatgggtatttttcttgtgtgtgtatctgtgcatcatgtgcaagcagtacccatgatggtcagaagaaggcatgagttctccagaaatgatgttaacaggctgttgtgagtaactatgcaggtgctgggaatccactcgtagtaagtgctcttaaccatgagtcttccctccagccgcactattaaagatattctatgacaggtttgaacatcagggttaggagggagatgcgcagaatcaagtaaggcacattggagagtatgctatagggtgctctgtgagtagcagctcacagtagttagatgaagcatttttgtgggatttgaagttagtttgttataactgggtggctcctgaggggcacctgatagttgataagataaaatcctagcccacaaaaaaaaaaaaaaaaaaaaagccgggttttgtggtgcacgccttcaatcccagcagaggcaggtggttttctgagttctacagagaaaccctgtctcaaaaaaccaaaaccaaaacaaacaaacaaacaaaatcctagcccacagcaatgcaggaaacaatttctttgaggttctcaggcaaagtctggggaatgggatgggggcctacccaaggccatacacatttaagctttaggcctagtttattgttaccttaagataaaattgactacatgaagaaattatttctgtgttcgtaaccttcatagcaaatgctgatgagctagagttcttactttcttacttttcatttggcaggagactttaatcctgggtggtagctactcatgtcccccaaatttccctgtctttcctgcctcagaggtgtagagaaaaagcattctacagtatagatcctacagccccatggggagatggtgtaggctgggaccttacagacatcaaatccctcaggagcaaattggtaaaggcagttaactctgatttaatgctgatttcagcaagctgtgtagtgcctctgccttattacagaagcagccgctggaggctctggggtttatctctagctgtgcagcagtgtacctggtcaaggcagtatcagaaatgtgtgtatccacttctaagctgctttgtttgttttccttctttgattacatttaatccaaggtctctggctccaaggagttggcagtgttgagggaagttgtgagttctggtacccagaagtcaagcttagcacaatttatatcctccacattgcctttggctagagctatatggggctgtaacagtgaaggtatgcaaggagaggttctacaggtgtacgggtatattatcgcaggacatagaacaggacacagaaaaaccctgtttaaaaaggggtgggaattttttcatcttcttaacttatcttcaggctaatgagcttttctaaagaatggtctcctggccaggtgactggacagatccagttggaataatgtagtttatttaaaacattgttatcttttatgtgtgtggctgttttgcctgtatatatgtctctaccatctgtgtacagcactcagggaggtaagaagttgtcagatcccctgaaactatagttatagttgtgagagctgtcacgtgggtgttgaaaattgaaccctaggtcccctgatagagcacccagtgctcttcatcaatactccttctttctagcccccagttgcagtaacacgtaaggttgggggcaacaatatataatgatctgagcagcatttttttttttattcaggatgaaatagaagtcattgtgtagtttttgttgttgttgttgtttgaccaaaaaaatttgtagctttcctttaatgggctgaaccatgataatctcttgtatattttttgttatgatattttaaatctttatttatttatttatcttatatatgagtacactatagctgtcttaagacacattagaagaggacattggatcccattacagatagttgtgagccaccatgtggttgctgggaattgaactcaagacctctggaagagcagtcagtgctcttaaccactgagccatctctccagctcaatatcttaaaatcttacggagagatttccttggtagtgtttccagggaagtagtaggtggggttcaaagttgatgatgagacaggggtctatgttcagtgacctccaaacctgcctgccatatgtgtctagctacttcacaggaaccccaagcccttcaaaaaaatcttagaagcagagacccaggcttttccagtcattgaatatgctgggactttgatgtaaaacttctcatcactaagactgttttctggatacgtggctccttgcaggttggaaatgagacacagactagttctgaagtaaaggaagagtaaacatttattgcagaagagaagtgcagtagcactgccccagaagtagagtagcagtgagaagagaaaacacaggaggggggtgtccctttcagggacagagtaacaaaggtggatagatgttttgtgggagttaaaatagtcatgtcttttttttttttttttttttttgaattctcgtggtgttggaagagctataaaaatgtagtgtgtgtgtactgtttttgaatattgctcaaaatatgcatgtgtttgttctttttgtttgttttttgttttgtttttgagacagagtctatgtagccctggctgtcttggaactcacttagtagaccaagctggccttgaactcagaaatctgcctgcctctgcctcccaagtgctgggattaaaggggagcaccatgacctccctgtatgtgcctgtatttgtgttccagnnnnnnnnnnnnnnnnnnnnnnnnnnnnnnnnnnnnnnnnnnnnnnnnnnnnnnnnnnnnnnnnnnnnnnnnnnnnnnnnnnnnnnnnnnnnnnnnnnnnnnnnnnnnnnnnnnnnnnnnnnnnnnnnnnnnnnnnnnnnnnnnnnnnnnnnnnnnnnnnnnnnnnnnnnnnnnnnnnnnnnnnnnnnnnnnnnnnnnnnnnnnnnnnnnnnnnnnnnnnnnntccttattttttattaattatctagtcaggaagtattgttacatagcctgaatagcactaacacatttacgtctccctttcttcattactctttttttccttccttactaagtagccaaagctggccttgaacttggaaccctcctgctttaacatcccaagtactagggttacagatttttttttctgttttccttgattcctttgtcaccttatttctttatcttaataaagattaatttattttttgggagggggggctggagtgatgactcagtggttaagagcactggttgctcttgcaggagacctgagttcagtgcctagtatctttcttcatggcagcactgaactttctataactctagttctaggggatcagaagtctcttctggacttcacgggcacccggaatgaagtggtgcaggccatatatacaagcaaaacatccattagataagcaaacgagacaggtctcatggagccctggctgatctagagatgtctagaccaggcttccctcaaactcagagattcacctgggagtaaaggcatgttccacaaacctggcttgttactctggtttttgtaacacaccctcccttcctcccttcctcccccgccaccctacccttgtatatatgtgtgtgtgtgtgtgtacactcaagtgtgcaagtagaggtggtagtactgtgcaggagtcacttctcctaccacgtgggccccagggattgagctctgtgtgtcaggcttggcatcaagcacttttacctgctgagccattttccagctcttcttgctgctttcatctagtctagcctaggggtgtagatcagtgataaaatacttattttagatgcactagtcttgagttcattccccagaacttggggggttgggggaagcaaaccaaaataaaaaacaacatcgtttttcacctctgacctcatctaggatttttttctaatcgcaaaagcaagaggtttattttcctgtgcatcagggttgaccttcaattagtccctctaattagaaggtgaccctctcatctaggatttttttttcttaaaatttatttattttatgtatatgagtacagctttcactgtcttcagacacaatagaagagggaatcatatcccattacagatggttgtgagccaccatgtggttactgggaattgaactcagaacttctagaagaagttaaccgctgagccatctctccaggccctcatctagggttttaaaaagttcttatttaagtagagaattcttggccagactattacttatcgtccttttttcttttttattgaaagtagatttttttctcacataatatatcctgtttattgttccacctcccagactcatcagcttctttttaaaaaaaaaatctctctctctctctctctctctctctctctctctatctatctatctatctatctatctatctatctaatatgtgcacactgtagctatcttcagacataccaaaagagtgcattgaacggtgagccaccatgtggttgttgggaattgaactcaggacctctggaagaacagtcagtgctcttaaccactgagccatctctccacgcctgactcatcagctccttaaagtcttgtttcttgtgcccttcccttttaaaactcttggaagctagatatttcaaaaaaggtgctcagaaggttgatatacttgctgcccagcctgtgatctaagatccattcctggaacttacatggttgaaaggagagacccaactcctgagagttgtcttctgctgtccatattctgtggcatgcaggcagctcctcccccccaccccgtgtaacagctttggttgacttggaattcactctgtagaccaggctaaccttaaactcaagagattaagtttctgcctgcttctgcctcccgtgtgctgggagcaaaggtgcgcaccatcttgccagatcattaggattttcttagtcagtctatttgaaacaaagagattcaccataattctcagccacaccttctgggggcagcccagataaagaacatgcaatnnnnnnnnnnnnnnnnnnnntcaacccctccccccctttaaaaagtccttatgaaaagaattttcattggttgtaaaaactaatttagatttacttttatttgtgtgtatacatgtgtatctgtgtgagtgtgtgacctacatcatgtggcagtctccttggaggctggaagaggcattggaccactggagtggagttaaagatgttgctgagagcccactttgggtcttctggaagagcagcaagtaactgctgagccatccttcaacctgggaagctagcttagcaatgcttgctttagtatggcttttcactcctggctattttagttcagaagaagagaaactactacacacttagtgaaaacaaaaatgtcacagcaattgaacataatacttgataactatgaaaattccttttccgagtaaatacgttttcagctgttctacccatagatggcagcagtccttcaactgtgttgttggagggatgcttagttgctcttgattcttcctagcctaactaatcagtcgtcctagaaatgacaggcaagattaaagagatctaaggtttggagtatgaagaatagttgattctaaaatttaaaatggcttttccttttcttagctgaatgttagaagtatgtttacacttacatattaatttattttcatatgtgtacatgtctgtccaaataaggtaaaaggcacgtgtggagctcagacaactccaatagtcatttctctcctaccatgtgcgttttcagggattaaactctctcaggtcattaggcttggtggcaagcacctttacccaacatggccttcttgccaatgtagaggtatatataatttttttaatatacatatatatttttattaggtattttcctcctagaggtatatttttaattcttacttaaatttggaacttcaaaattatggttcaaggaggtaaagtatgctttgactcattatctatgtaacttattttctgcactgggggtagattgagtttttctttcgtttttggttttgttatttgttttgtcttggttttgcttgctttgagatgaggtgttgctctgttacccaggctgggagttcctgggctgaagctcttcccctgcctcagccgcctatgcagctggtatcaggggctgcacgtccatgtctaccttttcttttcttctggttttgagacagagtctcagtatgtagactgggctgccttgaactcacagagatccccctgcctgtgcctctagtgttaggattgaatgtgtgtggcagcatacccagcatttgttttgattcttagtaatattgttattatcctagttttaaagaatatgcattttgaatttgcagtacagattcttttctactccattacagaatctaatctacagattcaacctctctggtttgtccactcagaaaatgttaaaatctcaggacatgtgggcagaggcagacaaatctctgtgaattcgagtctagcctgacctgcatagcaaattccagccagagagagagagagggagagggagggagagagagggaagttgggagggaggnnnnnnnnnnnnnnnnnnnngagggagggagagagagagagagagaatgtcaagaaactgctgtgtaaaatgtgacaatttgatattgagaagtaaaataaattttgctaattaatatccagtgttattctcaataaagaaacttgttttttcttatgttttctttctcatcctctttcaaagtcttttatatcagtaacactaagctccaggcttctaataacagaaaataattcttcagtaacaatgctgtacaagtgagacatagagtacttaggatagtcttgtgaagattcctcttgtaggagcagagcagtaaagaagctgatggaatactccagttaattaactaataagctcgtacctaacatgaccataagtttgatggactaactattcacttggatttcttaattaacatgaacagtttataatagcatctttaaaaaactagaacttaatattgcattttgaagcattgcatagatacaacaccttaaacaagagttgaaacatatattcatagtatgttgtaatgaaatatagccttaatctgtatcaatatacaaaatccaaaccaaatgtaaatttttttttttttgagacagggtttctctgtgtagccctggctgtcctggaactcactctgtagaccaggctggcctcgaactcagaaatccacctgcctctgcctccaagtgctgggattaaaggcgtgcgccaccacgcccggctcccaaatgtaaaatatttggttcgttaatattctttggtctaaaagtagattcaacaatctacccctttatcctattatttctaacttctctctctttctctaacactagataggagagagagagacggacagaggaaagaaacagaaatccctgaatctaacctccctgaccaagaccactaataatcctcccactgagtaaccaa

SEQ ID NO: 2363 - DNA, 410 bp, Mus musculus
gccgcggccgtgtcgctgagggcggacggcgtcgggcgcgctgggctgtgcggccgtcgctgcctggcacgcggggcgcgccttgacccttcctgcactgcaggcttccgacgcgcgcgaagaccgcggctgcgcggccgggagcttgctccgagcggacctggctctgcctgaggagcggcggctcgcgaagaagcgtctccccgggagtgggccgagggctgtgtggaccggcggcggcccctctgcaccaagctgcggttggtttgccatccacaaatgcagagctgaggggctttatagatcagaatttcagtccaacgaaagtttcaagcaccaactcaccaacaaagattttaccgaaaaccttagggccaataaatgtgaatgttggaccccaaatggtaaga

SEQ ID NO: 2364 - protein, 129 aa, Mus musculus
  VARIANT (1)...(129): Xaa = Any Amino Acid
GRTASGALGCAAVAAWHAGRALTLPALQASDAREDRGCAAGSLLRADLALPEERRLAKKRLPGSGPRAVWTGGGPSAPSCGWFAIHKCRAEGRSEFQSNESFKHQLTNKDFTENLRANKCECWTPNGKX

SEQ ID NO: 2365 - DNA, 218189 bp, Homo sapiens
  misc_feature (1)...(218189): n = A, C, G or T/U
gaatgatcttggagtgggaaggacagaaacaggtgcttgcaaaatcagatatttctgaaattctctgttattctatttctactgtctttccccactttactataaatttgatctgttataaaatggctgtgtttagatagatacccgtgatgtttaggaaacaaatgatatagagactcccatttaaatgaatcttatctttataagaaacagccaaactgttttccagactggctataccatcttacattcccaccaggaatgtatgagtgatccagtttctctgcatgctcgccagcatttggtgttgtcactatttcttatttcaaccattctgtttatccttttcagtgaaatatctgttcatatcttttgcccatttgccaattgaggcaggaggatcacttgagcccaggagttcgaggctgcagtgagatatgatcactaaatgtttgcttaatgagccatatctttaaatatcttttttaaagtttttaaaagtcagtccagtggtttatgtgattatgtgggattttttaaatctttccaggcaaaatgtgtatagcattttgaacatatttacactgtactgagcccaagagttctcatattctttctttgctcattatagagtatggtactaatactgtataatagtaaattttcaaagatacctttatttagaatgttagagtatacagatatatactttgtacatagttatcataatgtttctaacctttttatttaaagcaggctgatttgtgtaaaggtttcagaatgattttgttaataagttattagaaactttcctatttgtacaagatggtaaatgtagattccaatttgtatgcctcagtaaattcataatcttatttctctgatgtgagccactgtgcctggccttctgtgatgctcttaatgaattttgcagttttattaaattgtcattgagaacctcataaatcattgttaagatctatacaaaaaatcaaggatccacagtaatagaatatttttcatctgcatatgaatttttcccttccctttttgtctacttttagatttaaaaaaaattaccaggacattcttattaaatactattacctgttttggtttctgcacattaagaaagtcacagagaagccagacacagtggcatgctcttctattcccagctactcaggaggctgaggctggagaatcacttgagcccaggagtttgaggatatcctgggcaacatggtgaaacttggcaaaaacaaaaacaaggccgggcgtggtggctcacacgtgtagtcccagcactttgggaggccacggctggcggatcacgaggtcaggagatcgagaccatcctggctaacatggtgaaaccctgtctctactaaaaatacaaaaaattagccaggcgtggtggcgggtgcctgtactcccagctactcgggaggctgaggcaagagaatggcatgaacccaggaggcggagcttgcagtgagctgagatcgcgccactgcactcctgcctgggtgacagagtgagactccatctcaaaaaaaaaaaacaaaaacaacaacaacaacaacaaaaaacaaccagagaaatagcacttgttaactacaattgtgactctaggtaaacttgggccttaatatggttagacaagaagggttttaggtaacttgcctttttagatcctatttaggcttattagtctatattctacattcttgcacgatggaaattactagagaagtgggataattctttgttgtggggaaaataaaatttgttgtgaaaatatactgtattttaaaatatttagaaagattataaataactggagaaaagataatttcatatactaatatgatggaattagcctagcagatgttaaaaatcctttctgaaaattataatctaaaattatttgggaaattacaatggaactgaataatctgtacgttggtatattaaagccatttttatattgtgtttctctgttatttgctttgagttcacacacatatttagtgacatctatatgggtggaagattcagtcagataatctggattccattccttgaccatagtggagtctctcatgagcccagggtactatttcatagtagaagatgtatgaacattcatagtagaagaatgatgaacattgagttgtttgaagaaaggaagaggttttggttttgtcatatgttgtttttttttcctgttcaaagtaatattagtctattgaagaggacaaggaacgggggacattatggagatatgtggagctgacgttgctgaagtttctctggttattttgtagcaataattttgaagaatgggttttatttaaaagaaattgtagaaaaaaagaaatgatgataatattgagtattcgtgtattttttgctctttagaaagaaacagaacccattaagaggtggagcttaggctggaagtggtggctcatgcctgtaatcctagcagtttgggaggccagggtgggaggatcacttgaggtcaggagttcaagacctgcctggccaacatggtgaaactctgtcactactaaaaatacaaaaattattcaggcatgatggcgcatgcctgtaatcccagctactcgggaggctgaggctggagaatcgcttgaacctgggaggctgaggttgcagtgagccaagatcacgccattgcattccatcctgaggcatgagagggaaaccctgtctcaaaaaaaaaaaaaaaaaaaaaggagattataaggcaaatacattagatttgccaaattttccttcccccttgcccaccacttgagcaagaacatttgctaccagatcccagggagttctcatatcctttcacccagcccatgggagcccttgtcttctctcttccagaaagccattatttctattagcatcccaatcttcatcaccaaacaccgtcaagaactgagaagagtctgaaattttactctactttggaagctaacaagttagcctcccacagttttatagatacaggttgagtatcccttatctgaagtgctggggatcggaagtatttcgggtttaagattttttttttgattttggaatatttttattatatatactttccaattgagcatccaaaatctgaaaacttgaaatctgatacccagatctgagcatttccttcacacatcatgtcagtgcttaaaaagcctcaccagcttgggcaacataggaaaatcttgttactaaaaaaaaaaataaataagaaaatcagccaggcatgatggtcatgcctgtagttccagctacttggaagactgaggcccgaggatcacttgaacccaggagttcactgtaagatatgatcatgtcaccacactccagtctgggcaagcaacatgctgtctctagtaataaaaatgttttaattaaaaatgtcagatttaagagcatttaggatttcagagttttggatttggggtgctcaacctgtactgatgacaaaagatatgagactcctgcctcagggattaaagactttattactcataacatagcaagcatcaattatcttcatatttacgttggttctccttgcctcctaagtcctgtgaggagcatttcaggttaatcctgtgaatgcagtggtttgtggtaaagctgaagaacctcaggctcaggaaacctgaatctttcttaatagattggaagtaaacctctctgatgcttgtcccagaggaaaattattatcatgatgtttgatcgttggacaaaactgccctctgctgtggagggagacaccatctctgtcttacaacaaaagtcagtgtctgtgcttgtaacacaaacagaaatgagaaacctatttagaattatctcccaataataaattcattattttgattgtggcaatggtttcatgggtatatgcatacatcaaaactcatcacattgttcactttatgtacagtttattccatgtcagttatacctcagtacaactgggggaaacaaagtcttgctactcaaatatgtcattgggaccagcagtctcaacatcacctaggtgctttttagaaaagcagaatttcaggccttatcccagacctactgaatgagaatctgtattttaataagatcccctggtatttaattgttaactttttgttttgaaacaattttagagttacagaaaagttgtaaaaatagtacacagttcccttttcattagcttctcctaattaacatcatgtataaccataatacaattactcgaatcaggaaattcacattgatacagtggtcttaactaatctacagaccttatttgaattttgcctgttttctgagtgatgtcctttttctcgttcagaattcagtccaggatcccacattgtatttaattttcatgtctccttagtctcctccaatctgagatagttcctcagtctatttttttcatggccttgacatttttgaagtgtactggcagttattttatagaatgttcctcactttggcttggcctgattttttattgtgtgtagattgaggttttgcacttttgttaaaatactgcagaagtgatattgtggacttctcagtgcatcctatcatgaagctatatccctgtgtcttattaccgatgatgttaacattgatcacttgattaagatagattaagatagtgtcttccagatttctccactctaaggttactatttttctttagtagttaataagaattttctgagaagatactttgagaccatgtaaatatcctgtttgccatcacacttttcactcactagttttagtgtccatggatagttttctcctgcaacaatcattccggtgttgagtgcctagtaatggtgattttctatttccattatgcctttttatttattaattgaattctactgtatggaagagctgtctcttatcctccattaatttatcactcaattatttatatcagttttggtcacctcttgccccacttcctatcatcttggcccacctttttattccacttgttgcagcaatcagctgccccggtgtatgctgacaacaccttgcctcattgtgccttaccatatctcctgttctggactaggatttccttgcctctcagcttggaatacttgtctgaacttgctctgttattttcacccatgtccaaaccttgaagtactagagagttgacacccgacagagcaactttttcacagtgaggatgggagccagtgtgtaaatatgcccctcttctgtccttcaagtggacagttttgaagtatgctcttcaaaacttcttggagagtcccgtccaggatcaagcctcagtagcctccagcagtgatcatctcagtaacacatctcagtaacccataacacatggggttggcttttcctccttcgtgtttcacgcttgccgtctcccactccagttcatggaatcatctcccaaaataaaccaactgcatgtaagaaattgtgtcagggtgtttgtggggaaggagaaccagctaagatctgtgcattaccagttgttaaatattttgactgtcacccctgttcataatctaagaccctgtggaaaatttcacatgtacaaaggagacaggaatattcatagcatcagaatatgaaaaaaggtaaaaactcccaaatgcctttcagtaagagaatggattatctgccgggcatgttggctcacatctgtaatcccagcactatgggaggccaaggcaggcggatcacttgaggtcaggagttcgagacgagcctggccaacatagtgaaaccccgtctctactaaaaatacaaaaattagctgggattggtggcgcgcacctgtaatcccagctacttgggaggctgaggcaagagaatcacttgaacctgggaggcagatgttgcagtaagctgagattgcaccactgcactccaacctaggcaacagagcaagagtctgtctcaaaataaaattaaaaaaataataataaaatagaatggagtatgtaaatgttatttttgcattagtgaaaatgaatgaccacccatcaagatagatgaccctcttaaaatgttgaacaaaaaaagattggcagatgaataataaattttattctaaatttatgaagttcaaaaacatgaaaagctaagcaatatattatttggatatacatacacgtgtgttaagattataaagaagaacatggaaattatacacagaatttaagatgttattttggaaagggaaagttgtggggacacactggtagggggcacatgaggtttcaatggtgttaataatatgttgcttaagcaggtacatgagggtttatcatgattcctcatatctcacatttactttatattttttagggtgaataaaatattttatcctaaaaatattttaggtttgatattaaggggttacttttattaagggtgactttgaaacctttctactgctctaatgcagtcattccagaaaactggggagaggttgaatccctccctgaggaaattccgaggcttcgcctctactctgtcctattaaggtgattaaactgtacataacaggattgtctctagaagcaagacccagatttaacacttataagtgttatttcttttgtcagtcactagatggatttggtgtgaaaagaagatgctttaaaaaaaaatctgaaactgttctgacaactgcagatcttttcatgtgataaaaggtgtcactaaggaccttcttactccaagtgtgatttttggctgctgaggcagcaccagcatcacttggaagcctgttggagatgcagaattgaagccacaccttacagactgaattgtaagattccctaagtgattactgtgcacctcaaggtttgagaggcagtggtccaggactctggtacttccacctgcaaaagcagtatccagtgccagcagagggggcagcacgtggaaatgcctcaggtttaactgtaatggacccgtctttttcacaaccctctttgtgttggctattctgtggcccgcatatttctaaatagagtagactttattatacctctctcctctttccaaatttgctgggctgtggactctcatctattcaataaaaacattgaacttccattaagcactgaggagatgatagtgaatagaatgatatgactttgactctagaagcttacagtctaatgggatgcaggtagcaagtgagtaattacaagtttaatgaatgttggaaagtcaaagaaaattttatgggaaaacagttggagatggggactccggggaagcttttctggagaaagtgttgtttaagtttagatgaaaaggcatgtgcaggtgagttgtgggtgaactgggggattgttccaagcataaggaatgccaatgaatggtgctctttggacatctgtttgtattgccagtgccttgcatagttcttggcatacaataagtgcttaataaatgtttgcagaatcaataaatgttctgtcacatttcagatgtctactctctggcattggagatggtggaaactttattttccttttcaaaggaaataagatcccttaatggggaaataagaaagaaagctgactgttgtgcaaattgctaaattggaactatgagtgggaatgaaaaattgatttacatgaattttcttccctgtagcaacttgacaatttattctgttctggagaattctcagtttttggcttaaaaaccaagctgttcctccttattctgaatttcttggcctgctgtgaaactaacatttactgtcttttacaacatgccctgattaggtcatggaaattcacaactaaatcaaactaggatatggaaaatttgaaactttcactgcccattttatgtaatggcgttggaaggtgttataaaacattgacttttaaatctttattttcaaaagctatattatacgatgaatataataattgccatcatttattgaacacttactacatgcattacatagcaaaatcctcatactacctctgcaagagagtaagttgaaccatatgaaaattgcccaatatcagcaatttcatgtggttcaacctagtatcttcagactctgacctataaagaggttagggaatccctcatagccataacttcactccaaatttagtactgaatcttttagtactatcttttatagataaagagatcctaagatagttacagctcctctatgacagcgacccctttccctacattagcccaagcactttgtgtgtgtacttccatcatggttatttacgcattgaattgaggtggtttacaatccatttcctctgctacactgagttccttgagggtggatgttttgtctgtcttgctcatttttgtatacgtagtacctagagtgaaaagtatttgttgaatataactttaagttttcttaaagttatattttttgtggaaactaaatttttattgatttgttactggagaatgtgaagtaatcactggggtttttgcattttagaatcagtcagtggagtactgcatttgacattcttggactctcaggactagttacatgcaattatgcatacaattgtctctccaccctgccccagagaaagatctgaaagtgctctcttacctatctcatctcctttaggcatttgcttaaataccaccttctccgtgctaccttcccagatcactctatttaggactgaagccattcctccaacacctctgcttatatttttttcccatagcacacataccagcatgtaatatagtttttgttttacgtattcttttgcatattatctttcccatcctgctagaatgtaagctccatgaaggcaggagtttttgtctctattttgtccactgatgtctccccatatcaagaatagtgtttggggccgggcgtggtggctcacgcctgtaatcccaccactttgggaggcccaggcgggaggatctcttgagtccaggagttccaaaccagcctgggaaacatggcgaaacagccgggtgtggtggcgcgggcctgtagtcccagctactcgggaggctgtggtggtaggatcacctgagactgggaagtcagggctccaatgagccgtgatcctgccaccgcactccagcctcggtgagagcaagaccccgtctcaaaaacaaacaaagtggcatatagaagatctataagatttgactggagtaaaatgagaaagatctaatcgttttaatgcgctgttcacacggggtttttaacttcggcacgaacgaatgaacaaaatcttttcatatggaaccaagtgtacgggtatttggggtgtgtgcagtttccgcgggacagaatgacctgtcctggtttgggtattaacttgccttgatattgaagaacctccacattcccagtggtctctaactcattgtctgaataatttcaaggtgtcccacagttggccccacgcatagcctcaatcacgatcactcgcccccctgtcccttattgatgctcccccagggcgaccccgcaaaggcctggggaccgaatggaactgccccagtccccctccttccaagagagctggggttttctggcttcggggtcagttggaaaagagattcccacccaagtcgcagggtgggagtaggggggatgagataggagtgatgaaggaagtgtgtctaaaattctaggcctcaggcccgcagctgtccctggaggcggcggggaagcggggtggtcgggtcctgcggagggctcccagggaggccacagggggaaccaaggggcggtggctgagtgcacgagtcccgcccctccatctgttggccccctactctcaaagggaagcctgggggcggggtttgtttactccgtgcacgcactgccggcccggccaatccgtggggagcggcgccaggcgtcgcacattctgagggccaatcggcgcgcactgtgctgctccgccgccaaagctcgcgcgggggaagcggggctgtagctgggcagggagagggcggacgaaatcggtagcgatctcggctgcggcgctgccgcagctgcccggcccgcggggcgcgccctgacccttcatctttgggcaggctcgagggcgcgcgcacggttggcgttctggggcctcaaactcctgggccttgaccgggcaggccgcgtctccccgggtgtgagtccaccgggacccggccgccgcctaagcgcgggcgccacagaagcggcggcgcccgaagacgcgctcctggctcggcccgacagcctcgcttggccgccagttcttctgcagccgaaggcggtaaggtctggggcgagggcgcgggcccgcgcgcggagggcctttggacccggccgggcgcgttcctgggtaggtttccctccctgcgcacaggggcccccttgttcccccacgagtcccatctgtttagacctgggttctccaggcctggccgggtaacccgtgagtgtctgggccagagtcgaaagcagaggagggtcaccctcttagtgcatagagcaaatcgggggaggtaacgtccctgagtcacgcctcgtggaagaggggaagggctgctttctactttctcgttctcttcaaagaaggatggcttctaaatctggttttccgatttttcccttctcctttcatgactcacaggcctctgtgtccaccaggtgttttgtttgtttttaaagagtttctaagctttgtgtgcttggaagaacctcatatgccccataaaggaacttttctctgaagtagaggatcgctttttgggcccagactcctttgagaaaatctggaaagccaaggtctgtcttcacaaagaagtgtaagggttttcctaggatctcgctgagagacagtacaacgaagtggatgagcgccccagtctctcttaccagcctgtgctatctcccattgtgtgatctcggtttcttcatctgtaaattagatgcatccacctattcggtgtgtttcggggagtgaatggactaatgtatggaatgcaatcgtaagaaaatcctccacgtattaaatgccttgcattagttaggcacttttattattgactgccatggatgctggtttagaaaaagaccctatattatttcccttttagtgttgagacagtgaacgggctcattccttttccatattcactgctgaagctgcctttgagcccatgaatacttttatcttttcctcattccatctcagagggcacagactccctctcacttatttgctttctttcagtaaggctctcttttagctcagccttctccttcccctgtctccccgagatctgagttttgtgtcttttcatttgacttgcacaacctacttttttttttttctgggccatgtgttttctcttcatggcttgaatttatcttcacctaataaataatttacctgttttttttttcagctcgtgaatatatattcatctattttctatatggcataatcatgtccctgtctctctttaaaagtagatataaaaatagtttaattgatctatattgcagcttccttttccatttcattgtttagcctgttatttagctaaactttatcactatcagattactgtaattaatctttaatggcagtgtccattctcagacagcaccaggagaaaaatcaaatgcctagaccccagattctgtcacacttgtgtactggctctggatgtgtttgttatttattagaacatcttgtgcctgtaactagtctagtctaagagtagacatggtgtctgtagcgttgttctggctgtgcagttgcagtttgagcactgtggcccttacatttgttaataaaaggttcaagacttactaaactcttacttttcagttctcttcatttctaggtgtttaaaaaggaaagctgaatttttgcagtgtgtaatacttcatattctcattttgtgatcatgtaattcctcccaccctgactcttgtgaatgtgtagtccaagtggcacatggaagtttttctctggcagctaaaattcttaactgtctgagccgtgtgccctcaatataactgatgaagtgggatgtacttccttgtcatcatcttttaaactcttattgcaatatgtgttataatggatctcagaagaaactagaaggcatagattgagagttcttttagatcatagaattttaaattgtagtggattttaaagagaatcaaatacactcacctcttcatacttaaatcctttccgttttaatctgggatacatgactctaggtgtgcggcatgaatagatatgaaagtaggcttgtgaactcttggaaatattatgcaaaattatgcatatttgtatattttttggagagactatttatagtgtcatagtttctgaggcaaagatatttgatcaattctttttttttttttttttgagacagggtttctctatgttgctcaggcttgtctggaactcctgggctcaagtgatcctcccacctcaccctcccaagtagctggggttataggcacacacctcgccatgtttggacaactctaatttttataaaattatttctttcactgaactagaaattgtgtcctcactgtctcttctgtattgtgggttttcaactatttgaagatacttatattccactgagtgttagaaaatattctcagtctttaacctctgctagtgacttttgtgtcattgttttcattcacatctcctcacagaactcatagcccacttgtggatttgtttagttcatccacattcttctgacaagcatggtaccccaaattaggtattaactagtatagaagactaagttacctctctaattttaaagcatgtactttaagagtagacttgcttctttggcaaccacattacactgttactttataataatttactagttaagaagattaactttggggctaaccttcctgtgtttagatcctagctctgcagtttatcagctgggtaaccctgagtaagttatgtaaacactctgggcctaagtctcctcatctctaatatggggttaataatagtgtctatcttacacaattctgaagataattaatatatatatataagtcatttagaatgggttgtggcatcccagtactatgtatgtatgatacctattttactattggtttccttgtcaactaaaattgttgaattattttgttcatgctctctctgttcttaaagtcatactctctcaattctttaatagaatattttttggtaggactttacatgtatctatatttttattttgtaagattgcttctagtctgttgacattaaaaaaatcctgatttggtcatccaataaatatcaaatctatgcatttgataaacatacaagtttgataattttggcattgctttcatgcaaatttttcactaaaatgctgtctaggcagggctgaggtcagagttctttacctgctaaagacctctcttaaaggtgataaaaaattttattattaattctttggttcaggttggtcacccaattagaaattcagctaattttaatcatcatctacctcatatgtttccaagttctcataaggaatatgtgaggaactttgacagttgccttactaaaacccagattttatatgcttcgttttctttaccctatcattacttgtccttagtgaaactatactatattccagtagcatatgttaattactacttttttgtcttttttttcggaaaaggattatttatttatttatttatttatttagagacagagtctctctctgtcacccaggctggagtgcagtggcctcctggattcaagcaattctccttctccagcctcccgagttgctgggtctgcaggcgcttgccaccatacccggctgatttttgtatgagaaaaggattttttaattcaagtaaaaatgtggaatgctttaagaatttgtgtgtcatcattgcacaggggccatgctaatctctgatttgttcccgtttagtatatgtgctactaagggagcactgattactactttttctaagtgttcacaaacttctcttagtaatgatgctagaatcatgtctaaaattacatctaacttcagtgatcaatagttggcaggatcccatttctctttttttgaacacgagtactacatttttctgtctttagtcttctggcaacctctcctgctcaccatagttcctaaatgattgccaacagctgtgtggaattttatttggagcaatataccttgttgaaggtttacttagagtagttaggaactgtcttttatcttcatgttcatattgagctttcatttcctccagttcattgataaatttattaaatgcccattttgcacaagatatcaatgcttgttttacttgagccatcggaagagaatttttcttaataaaaatgcctgaagcaaaaaggtaatgtacatctatttctctccattcctcctattgttaatattaccgtagtctgccaccattccttctttagtgtactgcagtaatagcttcctgttaaccttccttcttccagtccttttctgtctctggtccttatgtatggcagccaaagttatctttgttttaaaaatgcatgtatgttttaaaagtcgtttctgggaggtgcagtgactcacgcctataatcccagtgctttgggaggccgaggtgggcggattgctgagcccaggagctcaagaccagcctgggcaacatggtgaaacctgtctctactaaaaatacaaaaagtagtcaggcttggtggcatgtgcctatagtcccaggtactcaggaggctgaggtgggaggatctcttgagcccaggaagtcaaggctgcattgagctgtgatcgtgccactgcactccagcctgggcaacagagtgagaccctatctctaaataaataaataaataaataggaataaataaataactaagtattttctttcctagtggcataagctgtaatctaattagaatttgatttctgagcatagtactttccaactccctttttctgtttcctctttactgtccttttaaattcaaacccctccacccctgctgccccgctttttttttttttgagacagagccttgctctattgcccaggctggcagtggtgcaatctcggctcactgcaacctccacctcctgggttcaagtgattcttgtgcctcaacctcccaagtagctgggattataggcatgtgccaccacacctggctaatttttgtatttttaatagagacagggttttgccattttggccaggatggtcttgaactcctaacctcaagcaatccacctctcttggcctcccaaagtgctgggattacagatgtgagccatcgtgcctggccatagatctcattcttttttatggccaaatagtacttcattgtatgtatgtaccacattttctttattcattcatctgttaacgaacacttaggttgcttccaaatcttagctattgtaaacagtgctgcaacaaacataggaatgcagatatctcttcaatatactgatttcctttcttttggctatatacccagcagtgggattgctggatcatatggtagctcaatttttagtgttttgaggaacgtccaaattgttctctgtagtggttgtactaatttacgttcccatcaacagtttgagaaggttcccttctctgcacatccccaccagtatttgttactgtctgtcttttggatataagccattttaactggggtgaaatgatagctcattgtagttttgatatgcatttcttcgatgatcagcaatgttgagcaccttttcgaatgactatttgccatttgtatgtcttctattgagaaatgtctattcagatcttttgctcattttttaatgggattatttgatttttttcctagagttgcttgagctctttatatattctggttataaatctcttgtcagataggtagtttgcaaatgttttctcccattctttgggttgtctcttcactttgttgattgtatcctttgctgtgcagaaactttttacttgatgtgatcccatttgtttatttttgctttggttgcctgtgcttgtggggtactgctcaagaaattcttgcccagaccaatgtcctggagattttccccaatattttcttctagtagtttcacagtttaaggtcttagatttaagtctttaatccattttgatttgatttttttttttagacagggtcttgctctgttgcccaggctggagtgcagtggcttgataccagctcactgcaacctcagcctcccaggttcaagcagttcttgtgcctcagccacccaagtagctgggactacaggcatgtgccaccatgcctggctaatttttgtatttttagtagagatggggtttcaccatgttggccagactggtcttgaactcctgacctcaagtgatctgctcgccttggcctcccaaagtgctgggattacaggcgtgagccaccttgcccagcctgatttgatttttgtgtatggcaagtgatatgggtctggtttttttcttctgcatttgcatatccagttttcccagcaccatctattgaagagactgtcttttccccagtgtgtgttcttggcatctttgtggaaaatgagttaactgtaggtgtgtggatttgtttctggattctctgttctgtccattggtctgtgtgtctgtttttattccagtcccatgctgttttggttactatagctctgtagtataattgaagtcaggtaatgtgattcctccagttttgttctttttgctcaagatagctttggctattctgggtcttttgtggttccatataaatcttaggatggttttttctatttctgtgaagcatgtcattgccattttgatagggattgccttgaatctgtagattgctttgatagcagtattgacattttaacaatattgattctttcaatccatgaacatggaatatttttccatttttttggtgtcctcttcaatttctttgatcagtgttttatagttttcattacagagatctttcacttctttggttattacctagttattcaattttatgtgtggctgttgtaaatggagttacttttaaaatttctttttcacattgttcactgttggcatatggaaatgctactgatttttgtatgttgattttgtatcatgtaactttactgaatttgtttatcacttctattaataatacttttcttgtggagtctttaggtttttccaaatataaaattgcatcatctgcaaacagggataatttgacttcttcctttccaatttgggtgccctttatatctttctgttgtctgattgctctagataggacttccagtactttgttgaataacagtagtgacagtgggcatgcttgtcatgtttcagatctttgaggaaaggctttctagtttttccccattcagtatgatactagctgtgggtctgtcatatatggcttttattatgttggggtgtgttccttctatccccagttttttgagtatcttaacttctttgcaacataaatattttatttaagacctatatgtccttttgcaacatatttcatgctcttttgactttttttttttcttgagacagagtcttgctctgtcacccaggctggagtgcagtggcatgatatcggctcactgcaacctccgactcccgggttcaagtgattcttgtgcctcagcctcccaagtagctgggataacaggtatgtgccaccatgcctggctaatatttgtatttttaatagagacagggttttgccatgttagccaggctagtcttgaactcctggcctcaactgatctgctgcctcagcctcccaaagtgctggattacaaacttaacccaccacacctggcctatgttcttttgactttaaaagaaattaaatagatcttcgttcaagatggccgaataggaacagctccagtctgcagctcccagcgtgattgatgcagaagatgggtgatttctgcatttccaactgaggtacctggttcatctcattgggactggttggaccgtgggtgcagcccacagagggtgagccgaagcagggaagggcgtcacttcacccaggaagcacaagggatcagaagatttccctttcctagtcaagggaagccgtgacagactgtacctggaaaaatgggacgctctcgtccaaatactggactttccccatggtcttagcaactggcagaccaggagattctctcccgtgcctggcttggcgggccccacatccgtggagccttgctcactgctagcgaagtagtctgagatggacctgtgaggctgcagccgggttgggggaggggtgtccgccattgctgaggcttgagtaggtaaacaaagcggccaggaagctcaaactgggcggagcctacctcagctcagcaaggcctactgcctctatagactccacctctgtgggcagggcatagcagaacaaaaggcagcagaaacttctgcagacttaaacatctctgacagcagtggttctcccagcatggtgtttgagctctgagaatggacagtcagcctcctcaaggggtccctgacacccgtgtagcctaactgggagacacctcccagtagggggcgacagacacctcatacaggtgggtgcccccctgggacgaagcttccagaggaaggatcaggcagcaataattgctgttctgaaatatttgctgttctgcagcctctgctgctgatacccaggcaaacggggtctggagtggacctccagcaaactccaacagacctgcagctgaaggacctgactgttagaaggaaaactaacaaacagaaaggaatagcatcaacatcaacaaaaaggacatccacaccaaaaccccatctgtaggtcaccaacatcaaagaccaaaggtagataaaaccacaaagatggggagaaaccagagcagaaaagctgaaaattctaaaaaccagagtgcctcttctcctccaaaggattgcagctcctcgtcagcaacggcataaagctggacggagaatgactttgatgagttgacagaagcaggcttcagaaggttggtaataacaaacttctctgagctaaagaagcatgttctaacccatcgcaaggaagctaaaaaccttgaaaaaaggttatggctaactagaataaacagtgtagaggagaccttaaatgacctgatggagctgaaaaccatggcatgagaacttcgtgaggcatgcacaagcttcaaaggccgatttgatcaagtggaagaaaggatatcagtgattaaagatcaaattaatgaaataaagcgagaagacaagtttagcgaaaaaagagtaaaaagaaatgaacaaagcctccaggaaatatgggactatgtgaaaagaccaaatctgtgtttgattggtgtacctgaaagtgacggggacaatggaaccaagttggaaaacactcttcagggtattatccaggagaacttccccaacctagcaaggtaggccaacattgaaattcaggaaatacagagaacaccacaaagatactcctgagaagagcaaccccaagatacataactgtcagattcaccaacgttgaaatgaaagaaaaagtgttaaggacagccagagagaaacatcaggttacccaaaaagggaagcccatcagactaacagcggatctctcggcagaaaccctacaagccagaagagagtgggggccattattcaacattcttaaagaaaataattttcaacccagaatctcatatccagccaaactaagcttcataagtgaaggagaaataaaatcctttatagacagacaaatgctgagagattttttcaccaccaggcctgccttacaagaactcctgaaggaagtgctaaacgtagaaaggaacaatcggtaccagccactgcaaaaacatgccaaattttaaagaccatgaatgctatgaagaaactgtatcaattaacaggcaaaataaccagctaacatcataatgacaggatcaaatccacacataacaatattaaccttaaatgtaaatgggctaaatgcccccaattaaaagacacagactggcaaattggataaagagtcaagacccatcagtgtgctatattcaggagacccatctcacatgcagagacacacatgggctcaaaataaagggatggtggaagatctaccaagcagatggaaagcaaaaaaaagcaggggttgcaatcctagtctctgataaaacagactttaaaccaacaaagatcaaaagagacaaagaaggccattacgcagtggtacagggatcaattcaacaagaagagctaactatcctaaatgtatatgcacccaatataggagcacccagattcataaagcaagtccttagagacctacaaagagacttagactcccacacaataataatgagagactttaacatcccaatgtcaatattagatcaacgagacagaagactaacaaagatatccaggacttgaactcagttctgcaccaagtggacctagtagacatctacagaactctccaccccgaatcaacagaatatacattcttctcagcaccatatcacacttattctaaaattgaccacataattggaagtaaagcactcctcagcaaatgtagaataacagaaatcacaacaaattgtctctcagaccacagtgcaatcaaattagaactcaggattaagaaactcactcaaaacctcacaattacgtggaaactgaacaacctcctcctgaatgactactgggtacataatgaaatgaaggcagaaataaagatgttctttgaaaccaatgagaacaaagacacaatgtaccagaatctctgggacacatttaaagcagtgtagagggaaatttatagcactaaatgcccacaagagaaagcaggaaagatctaaaattgacaccctaacatcacaattaaaagaactagagaagcaagagcaaacacattcaaaagctagcggaaggcaagaaataactaagatcagagcagaactgaaggagatagagacacaaaaaactcttcaaaaaatcaatgaatccaggagttggtttttttgaaaagatcaacaaaattgatagaccgctagcaagactaataaagaggagagaagaatcaagtagatgcaataaaaaatgataaaggggatatcaccaccaatcccacagaaatacaaactaccatcagagaatactataaacacctctacgcaaataaactagaaaatctaggagaaatggataaattcctggacacatacaccctcccaagactaaaccaggaagaagttgaatctctgaatagaccaatatcaggctctgaaattgaggcaataattaatagcctaccaaccaaaaaaattccaggaccagacagattcacagccaaattctaccagaggtacaaagaggagctggtaccattccttctgaaactattctaatcaatagaaaaggaaggaatcctccctaactcattttatgaggccagcatcatcctgataccaaagcctggcagagacagaaaaagagaattttataccaatatccctgttgaacattgatacgaaaatcctcagtaaaatactggcaaatccaatccagcagcacatgaaaaagcttatccaacacagtcaagtcggcttcatccctaggatgcaaggctggttcaacatatgcaaatcaataaaagtaatccatcacataaacagatccaacgacaaaaaccacatgattatgtcaatagatgcagaaaaggcctttgacaaaattcaacagcccttcatgctaaaaactctcaataaactaggtattgatggaatgtatctcaaaataatagctatttatgacaaacccacagccaatatcatactgaatgggcaaaaactggaagcattccctttgaaaaccagcacaagacaaggatgccctctctcaccacttctattcaacatagtgttggaagttctggccagggcagtcaggcaagagaaagaaataaagggtattcagttaggaaaagaggaagtcaaattgtccctgtttgcagatgatatgattgtacatttagaaaaccccatcgtctcagcccaaaacctccttaagctgataagcaacttcagcaaagtctcaggatacaaaatcaatgtgcagaaatcacaagcattcctacacaccaataacagacagagagccaaatcacgagtgaactcccaatcactattggtacaaagagagtaaaatacctaggaatccaacttacaagggatgtgaaggacctcttcaaagagaactataaactgctcaaggaaataaaagaggacacaaacaaatggaagaacattctatgctcatggataggaagaatcaatattgtgaaaatggttatattgcccaaagtaatttatagatttgatgccatccccatcaagctaccaatgactttcttacagaattggaaaaaactacttaaaagttcatatggaagcaaaaaagagcccacattgccaagacaatcctaagcaaaaagaacgaagctggaggcaacatggtacctgacttcaaactatactacaagtaaccaaaacagcatggtactggtaccaaaacagagatatagaccaatagaacagaacatttacaaccatctgatctttgacaaacctgacaaaaacaagaaatggggaaaggattccctatttaacaaatggtgctgggaaaactgactagccatatgtagaaagctgaaactggatcccttccttacaccttatataaaaattaattcaagatggattaaagacttaaatgttagacctaaaaccataaaaaccctagaagaaaacctaggcagtaccattcaggacataggcatgggcaaggacttcatgactaaaacaccaaaagcaatggcaacaaaagccaaatagacaaatgggatctaattaaactaaagagcttctgcacggcaaaagaaactgccatcagagtgaacaggcaacctacagaatgggagaaaattttttttcatcagagaaaatttttgcaatctacccatctgacaaaggactaatatccagaatctaaaaagagctcaaacaaatttacaagaagaaaaaaagatcctatcaaaaagtgggcaaaggatatgaacagatacttctcaaaagaagacatctatgcagccagcagacacatgaaaaaatgctcatcatcactggtcatcagagaaatgcaaatcaaaaccacaatgagataccatctcacaccagtcagaacagcgataattaaaaagtcaggaaacaacgtgctggagaggatgtggagaaataggaatgcttttacactgttggtgggagtgtaaattagttcaaccattgtggaagacagtgtggcgattcctcaaggatctagaactagaaataccatttgacccagcaatctcatcactgggtatatactcaaaggattataaatcatgctactataaagacacatgcacatgtgtgtttattgcagcactattcacaatagcaaagacttggaaccaacccaaatgtccatcaatgatagactggattaagaaattgtggcacatataccccatggaatactatgcagccataaaaatggatgagttcatgtcctttgcagggacatggatgaagctggaaaccatcattctgagcaaactatcacaaggacagaaaaccaaacaccatatgttctcccttatagttgggaactgacaatgagaacacttggacacagggcaggaagcatcacacaccagggcctgtcatggggtgggaggctgggggagggatagcattaggataaatacctaatgtaaatgacgagttgatgggtgcagcaaagcaacatggcacatgtatacctgtgtaacaaacctgcatgttgtgcacatgtaccctagaacttaaagtataataataataaaaaagaaaaaagaaattaaacatatgtaggctaaaaggaaatatggacgtcaagaaatgacatatagttttaaggttttgatgacagaagagaaaaatgctagaagttttcccaaaggtaggaaaaataaaaacataatagttctgggcacagtggcacagcctatagtcccagctacttgtgaggctgaagtgagaggattgcttgagcccagggattcaaggctgtagtatgctatgatcctgcctatgtatagctactgctttctagcctgggcgatgtagtaagaccccatatcttcaaaacaaaacaaaaactgtaatagcaataatagtgacaatgtctgttgttagtcacagagcaggagtaccatgtctggaaaaacgattgtacttcatggaaatgctgtggctaatgatgctgttatgaacaagggatattggtatgtctggtaaattgaatatggagccagaaaagttactgtgtttgagaataaaagtgatagtacatgtctctgtcatcaaactaggaaatgtagcacagacagattttttttctttttgcttaactgtaggtatataataaagtgttctgacaaactgttaaacagagccttgatagactatgtatctaggtttgtctgttgtctttctatctacctatctatgtgttaatattaggagcttctgacttatttaatacttcttcctgtttgtataaaattaactgcagtaattaactcagattggctgtgagcaaaaacagaactattacagtaatttgacttactaatttatgtaaaacattttctgccttttaaaaatcatcttaattaatgcaagggtagagtaattatcagcccaccaactatttatttattaggattcccattgctgtaggcagaataaagcaatttttcatattgtgactaatggcaattttgattaattttgcgcaattagcttacatctatcttaagtaaccagtctgcttttggtaaaattttcatgtctgaaataggaaactctcagtttatattttctttttcttttttttttttttgagatggggtctcgctctgttgcccaggctggagtgcagtggcacggtctcggcccactgcaacctctgcctctcgggttcaggcgattctcctgcctcaggctcctgagtagctgggattacaggcatgtgccaccacgcccagctaatttcgcccacctctgccttcggtgtagctgggactacgtggaactccttcttctatatttttttcagccccactttcagtgtgcttccactgtacttagagggagttgctgttgccttcataatgcttcctccttttcttcttcttctttttttttttcttttctggagacagagtcttgctctgtcgcccaggctggaatgcagtggcgcgatctcggctcactgccacctccacctccagggttcaagtgattcttctgccttacagttgtgagccaccgtgccctgccctcaattttaaaatattcttaaaaagaaaaatcttcctcctatttttagtcccactaagccagaggtaaaaccatggtttaaaaaacaaaacaaaaccagaacacttttgaggctgggtgtggtgactcacacctgtaatcccagcactttgggaggctgcggtgggcagatcacttgaggttaggagtttgagaccagactggccaacatagcaaaatctgtctctactgaaaatacaagcagattagccaggtgtgatggcacgtgcctgtagcccagatacctaggaggctgaggcacaagaatcacttgaacctgggaggcggaggctgcagtgagccaagattgtgccactgtactccagcctgggcaacaaaaaaccaaacaaacaaactgcttttgggcctggtgcagtggctcatgcctataatcccagcactttgcagggctgagggaggcaggaggtttgagcccaggagtatgagactagtgaaaccccatatctactaaaaatacaaaaaatattagcggggtgtgatggcgcacacctgtagtcccagctacccaggaggctgaggcaggaggattgcttgaggctaggagatcaagtctgcagtgagctgtgattgtgccactggactccagtctgggtgacagggtaagactctctccaaaacatcctcaaaaaatacttgtatttgaaatttgataattcaaaaagttatacatatagtattataattacacagcttgatgaatttgtctattcatgcacctgtgccacagtgttttagttacagaagctttatagtaggttttaatgtctggtaagtctagtctcgttttgtagtttttctgttttagtactttcctgttattcttacatgtttgttttttcatgtcaatatcagcttgttcagctccataaaatggtttgttagtatttttattatcattatattgaatttataaattaacttgggagaatttatatctttataatgttgaattgtcttatccaagaatatcatatatttttctattgttcatcttcttttagtttcttttgggagtattttaacattttcctcatacggtttttttttttaaagctttattgagatacaattcacatgtcataatatccttttttttttttttttgagatagcgtcttaatctgttgcccaggctgaagtgcagtggtgtgatcttggctcactgcaacctctgcctcccgggtgcaagcgattctcctgcctcagcctcccaagtagctggaactacaggcgcttaccaccatgcccggctaattttttgtattttttctagagacggggtttcattgtgttagccaggatggtcttgatctcctgacctcgtgatctgcccacctcagcctctcagagtctcaaagtgctggaattacaggtgtgagccaccacacccagccctataacattgttttttaaaagatgtataaagatgtggttgtttagtatatttacaaatatgtgcagccatcatcactacctagttccagaacattttcatcactcttaaaaaaaccccatactcattagcagttacttcccatccccttctcttcccagccttggaaactactaatctatgttctgagtctatggatttgcctattctgaatatttcatttaagtggaatcatatagtatgtggcttggcataacattttcaaggtttatgcatgctgcagagtatatcaataatcatccctttatattgcaaaataatgtttcatatatgccatatttgtttatcagttggtggacatttggattatgtatacttttttactattttggtaatattgctatgaacatttttatacaaggttttgtttagactttttttttttttttttttgagacggagtcttgctccattgcccagacgagtgcaatggcgcgattttggctcactgcaacctctgcctcccgggttcaagtgattctcccacctcagcctcccgagtagctgggattacaggcatgtgccaccacgtccagctaacctttgtatttttagtagagatgggattttgccatgttggccaggctggtctcgaactcctgacctcaggtggtctgcccgcctcggcctctcaaaatgctgggattacaggcatgagacatcgtgcccggccagacatgtgtttttaattctttctgataggcgttacgcatttcttactacatttattactaagtattctttgttggtgttggattttctttaccattatatactccaagtgtttattaatttttgtattgatctgtattaatttgttgctaatcataaatttacttacaatttaacatatgggtccttgttgacattgtttgggagataattctttggtagacagggtgtactctcgcattttgggagcagatttctgcctatgtctcttagatcaaacttacagagttactcacattttatgtgccctgatttcagtttttgtctctttattactgagaggtgtgtattaaaattgtcttgtatgattgtggatttcttagtttctccttgtaaaatagtcagtttttgctttatatgtttataaattatgttatgaaatgtattcaaatttggattatttttgtctatttgtgtcttcctgctaaatactacctttctttaatcactatcttctttatcctcaataatattcttactctaaatacaatttgtctatgtttatagagacacgtcatcttttttcaatttgttactttctatgggtatactttaggcatgtttcttgtaaatagcaattgtattttgttttcccttttttttttttttttgagacgtagtttcgctcttgttgcccaggctggagtgcaatggcgtgatcttggctcactgcaacctccgcctcctgcgttcaagcgattctcctgcctcagcctcccgagtagctgagattacaggcgcccaccaccacatttggctaattttttgtatttttagtagagatgaggtttcaccatgttggccaggctggtcttgaactcctgacctcaggtgagccatccccttcggcctcccaaagtgctgggattacaggcatgagccaccgcgccctgcccatcttaaccatttttaagtacacagttcagtgttaggaagtacattcatattgttgtgtaaccatcaccaccatccatcttcagaacttgcatcttgcaaaactgaaacgctgtaccaattaaacaataattcccgggatcgcattaggagatatacccaatgttaaataatgagttaatgggtacagcacaccaacatggcacatgtatacatatgtaacaaacctgcacgttgtgcacatgtaccctaaaacttaaaagtataaaaaaaaaaaaagaaatagtaaatacggtaaaaaaacaaacaaacaataattcccattcctccttcctcccagccactgataaccaccattctactttctgtctctgtgaattagattactctgggtacctcatatgtggggaatcatacaatatttgtcttttgtgactggcctatttcactttgcataatgtcctcacagttcatcaatgtagcatatgtcagaatatcatgccttattaaggctgaataatactctatgtatatgttacattttgatgatccatttatctgtcagtggacacttgtgttgcttctacattttaaccattatgaataatgctgctgtgaatatggttatgcaaaaagctctttgagaccttgctttcaatttttttggagtatatacccaaaagtatatgggtatatgctacatcataaggtaattttatttttacgtttttgagaaactgccgtattattttccacagtgactgtaccactttacattcctaccagcagggcacaagtattctaatttcactacacccttgctaacacttgttattttctgtttgtttgatggtagccatcctaatgagtgtgaggtggtatctcattgtggttttgatttgcatttccctaatcattagggatgttgagtatcttttcacatgcttctttggggaaatataaatttaaatcctttgcctagttttaatttttttgtaaaagatgggatcttgctatgttgtccaggctggtttggcctgctgagtaactgggaccacaggcacaagccaccatttcctgtagtcccaactactcaggaggctgaggcaggaggatcacttgagcctagtttttaatctggttgtttgggttctttttttaaaaattgttgcattataggggttctttatatattctagatatgaaacccttatcaaatatatgatttgcaaatattttcccccattcagtgggagcatttttactctgttaatactgtctttttttgtgtggaatttcaaatttttcattgtctagtatgtctgtctttttattgcctgtgcctttggtatcattctccacctttttttaagatctctttatttgtaatgttttgctgtgtctaggaaagttatttttgttttttctttaattgggagtcattgtcatttctgaatctgaggatttttagctgttacttcctccagcaacccccagtttctagagtctgtagctaggcagagacattttcttgttattcctttgctgttggttgatttttttttttaaccagcctcccctgtccattcttgcactgagaatgtgtaaaaaatggtgaaaccctcaataccagctctgcgcttcatgcagacaaggtttctgaggccttgtctactttaagggcattaaaagccaaaaatcttagttactcatattgacaggttcctccagggttgctgaaagctttactcttttgtgagctcagcatttgacagactaatttatccagcatttctagatgttttattaagatgacattttcatattagttactgtgttgccaaaaaaaaagaaagttgcatttcttttttataattaatttatttcccttttctcctctttttcctttggaattccatgtagttggacctcctggatggaagaactcttctcaagcttttctactttaaaaaaaaatttctttgttttactttgtgggagaattcctacccttcctttgcttctttctcctccccaaatcccctgcttctgttctacttcccctccctccctctctttcttttttccttccttctcttttttctttctttctttctattttgtctgttaatttggtgtctcctgttttgttatcttggcctctttatttcatgttagagattttcctcagttgtttagtaaactttggccatctgttcagattaaagaccgaatcaataaaaagctgagtaaaaactctttgtccatgggagttgttaagtgtaagccttacacagggtgattgagtgcttgcaggtcttttctcttggatcactttccctcgcagagggatctcctagtcccaggccgattgttttgcgttctggaagctggtttggggaagaggcctgaggtccactgtacagcatgtaaatcttcatttaatctttttgtgagatgatataatacacaacccttttgtgtacctagtttctatgtccttaaaaggtaaaccatttgtttcttgctgggatgcagaaggggcattttctgtctttctttcttttttgagacagggtgttgctcttgcccaggctggagtgcagtggtgtgattatagcttgtaacctcaagttccggggcttaagcagtcgtcccacctcagcctcctgagtagctaggactatggacagacatgtgccgctacactctgccttttttaaaaaatctttttgttaagatgaagtttcactgtgttgcccaggctgatcctgaactggcctcgggtattccttccactttggcttcccaaagcactggaattgtaagtgtgagccactgggctcagccagaaggggcagtttcttagctacatgggttaagactttattcaaactttcaatcaagtctttttattaacagccccaactgagattgttactttcagatggcttcaattcttaagcctttgtgatgagatatatgtaagatatattttaattatgtatatataacttataaatggtttgggaggctgaagtgggagaattgcttgaggccaattcaggaccagcctgggcaacacagtgagatcccatctcaacaaaaagttttattaaaaaagcagaatactgaccgggtacagtggctcacttctgtaatcccagcactttgggaggccgaggtgggcagatcacgaggtcaagagatggagaccatcctggccaacatggtgaaaccccatccctactaaaaatacaaaaaattatttgtatttttacaaaaattacaaaaatttgctgggcctagtggtgcacacctgtaatcccagctactggggaggctgaagcaggataattgcttgaacccgggagttagaggttgcagtaaaccgagatcttgccactgcactgcaggctggcaacacagcgagactctgtctcaaaaaaaaaaaaaaaaaaaaaagcggagtgtagtgaaacatgtctgtctgtagtcctagcgactcagaaggttgaggtgtgagatatagatacctgtaatatctataatatgttaatatataatattaatatatatcttatagataagttatataattaagatatatcttatagatacatatatctgtatgtctctagggatatagatatatctgatcatctatatataattatataggtagatacatctaattacatatacattacatcttatagatatctataagatatctgtatatataacatatatgtttttgatgggtttatccttttttatctttttaacatcattttactgtaatttttttttttttttttttgagacaaggtctcactctgtcacccagactggagtgcagcggcaagaccttggctcactgcaacctccgccttccgggttcaagcgattctcctgcctcagcctcctgagtagctgggattacaggcacgccaccactgcctggctaatttttgtattttcggtagaaacggggtttcaccatgttggccaggctggtcttgaactcctgacctcaaatgatctgcccgcctcagcctcccaaaatgctgggattacaggcatgagccaccatgcccggccaattttactgtaatttcaagaagggatggatagagacctgtgtgttcatatttaaccaaagaaccttatagtacattttaattatgttattttcatgtaaaaataatattattataaactcaggagttttttctgtgtgcatttctactaatggttattgcagtttcagaactatagaaaggcatccaaaagggcaataagagacataaagaagaggaaaaataggttaataacaaagaataggaggctcagatacatgtatcagagggactttgatgaagtaacgtcgccaccttctggcttttaaaaaaactgtgttgtttctgtaataaaatctgggaatgtgtagtcccagctactcgggaggctgaggcaggagaatcgcttgaatccgggaggcggaggttgcagtgagccaagatcgtgccacttcactccagcctggtgacagagagagactacatctcaaaaaaaaaaaaaaaagaaaagaaaaaaattctgggaacaccatgactggtaagtagctaatttgcatcctgtgtcagatttagtggatttggtgttgtttagttgttctctatactattgaagaaacatactttttttgacataggatttgattacaatataacaaagtcttttcaagccccctaagaaagggttctatctaaaatatcttaaaatatgtctgttactttaggttatttctgcttgcattaagaaaacaaatattgtttctatgtgaaggaaaatatacaatttaaaaaattaagttaatttgttgcatagatagtttgtgttcatggtacaaaatacaaatgatatgagaggccatgagtcatcctactattttgtaagaattaataaaaaagaaaagaaaattaaaatgtttttctctcagctagccagttcctttgccttgagagaatctttttatacagatggtaatgtactacacatacttctttataactttctttttttcacagaacagtttatactggaggtcactctatatcaatacacaatgagctgcctcattttttttaggccatgatgtgtttagctagtctactattgatacgcagttatgggttttccaatcttttgctatataaatgacactgtagtgagtatccatatagatatatgtgtgtgtgtgcgtgtgtgtgtatgtgtatgatttcatatgactctagaaaaagctcatagaaggatgtataaatttctatttgtgttggatatggtgacactgccctccataaaagattatgcctgtttattcttccaccactaacgtaaggcaaactctgttttccctcatgtttctcaggacaatgtattggtatcagtcttttcatcttgtcttgaaaccttattttacatttctcttatgagtgggctgaacgtatttttatatgtttagaagcaatttgtgggattttttgtttgtttctttgagatagagcttcactttgtcacccaggctggaatgcagttacatgataatagctcactgcagccttgaactactgggctcaaatgatcctcctgcctcagcctcccaaatagttgggacagcaggcacatgccaccacgattggctaatttaaaaaaaatttttttttttcggtaaagatggaatcaccttatgttgtccacactggtctcaaactcctggcctcgagcaatactcccaccttggcgtcccagagcactggagttacaggtgtaatctacaatgcccagctcatttgtgttttctgttatatattctttgcctactttttctttaggctgtcactcttctacttatttttaggagctcatagttcacaaggtagaagttaactttctatagtataagttgcagatacaatttttccagtttattttcttatgatttacatagtgatgttttctttaaatgtaaaaaaaaatgtgcattttttgtagtcatatcagtctttactttgaagacttttctgggcttggtttcatatttagaaagatcttccacactcagaaaattaaaaaatttaacttccgtgttttcttctcttaccaaaaaaattacgttgaattctatgggctatctgaaatttattttgagtgaggtataaattatggctctaactaattttttctatatgattactcagttgtcacttctttattgaaataattcacccaatgcattcatacctcactgatttgaagtgtcagctaaatttctttgtggatttaggtcttttcctatacttttctgttccctctatctgtatgctttttcacttatcagtgtatgatattttaattattgtgactttacaacttgtttaaataattggatgaggtcaatccttctgtgtttccataattttatggctattcttgcttattttaccacattaacttttgaatcagttgagcaaattaaaaggaaaagatattgttaattttattgtgattcattctattcatagattaatttgggggcagttagtattgttatgattttgcgttttgtcactcaagaacctggcatttttttccatttgttttttgtatccctatgtatttcttgctgagtttcttcctgatgtttttttcttgtttttttctatgtaaatgagttaattttttccattatgtctttacatagttgttattagaagacatggttcttgtgtataagtaagctgctaatttggggggattaattttgttatcggtcatctccagttgaatctcttggggttgctctgtaaacagttgtaatcatatgtaaataataatagttttactgcttcagttctgctttatatacttctatctttcatctggttgtgttggttagtaacctatagaacactgttaaataatagtggtgagtgataatagtagaaatcatttctttcttttatttaatgggattgtttctttagtgatgcataatgaaaaatatatccatagattcttgagaggaatttgacaaaattacatatacattcttggtaaaatataatcctattaagtaattattcatcacttttcattatttcatcattttgcatgccatagctttacataaatgggccgggtgcagttgctcaagcctgttatcccagcactttgggaggcctagggaggtggatcatttgaggtcaggagttcaagaccagcctggtcaatgtggcaaaaccccatctctaataaaaatacaaaaattgctgggcgcgatggctcacgcctctaatcccagcactttgggaggctgaggcaggtggatcgcgaggtcaggagatcgagaccatcctggctaacatggtgaaaccccgtctctactaaaaatacaaaaaatcagccgggtgcagtggcacgcgcctgtagtcccagctactcgggaggctgaggcaggagaatcacttgaacccaggaggtggaggttgcagtgagctgagatcatgccgctgtactccagcctgggcgtcggtcagagtgagactccgtctcaaaacaacaacaacaaaaattagcagggctgtagtggtgcgcgcctgtaatttcagctactcagcaggctgagacaggagaattgcttgagcttgggaggtgaaagttggttgcagtgagccgagatcgcgccactgcactccagtctgagcgacggagagaccctgtctccaaaaaaaaaaaaactttatataaacgtaatcatactgaatgtgttagtttttaaattctgttacatttataaggtttatccatgttgttgcatgttactgcaattaattaattttaatagctatttaactatagctatttaactatactctgcccagatctcttcatattagaatacccattctccacctgcttaggctcacagctgcatcccttattgggaattgcccttggccctgaatactgtcttgcccaaggttatgcttcctcccagaggtgtccctgtggccagtaactgtgtgttgcttggatataagatccaacctaacttgtctctatttgggacaactccaaagggctctggagctccatgttgtatcagctgaggccccatttgcaatatcattggttcaatttcttccctaagtccaatcctgctgccttcacttgttataggtatatctccccagagcacttcccaggaaactttctgcatgatagtctccctctcagaatctgttttggaggaatgattctaacacagttggtattggaagtgatcctaggtagcagactaaattttagagataggtttctaaattttagagatagggattttagagataggtttcttgctggctggttggcagtgaggaccccgtctctggtggtaggtagagtacagatagtgtaagtttgcactgaatttatcgttatgtgggacccaagtgagcaggtaaacttttgatgcactgttatttaaactggtatctgtagacctggttataatgttatggattttcttgagtttaagatactctggtctgtattattctattatgccttttatttatttcatttaaatcagtgagtttttagttctttgggatcaaggatcctttatgctgacttcctaccaaagtagggtttaagagaatcctcatagtgtgtgaagatctccactgttttctcgttaaccagagggaaagttggcatggttgaacttgttctctgaggtcttaatagacaggtggctgtaactgataggtgttttctttccccttctttagattgcctaggtcagactagaacctcagaaatgtctacaatgaagttttttttttttaacttcgtatttttagtagagacagggtttctctgtgttggtcaggctggtctcgaactcctgacctcaggtgttccgtccgcctcagcatcccagaagtgctgggattacaggtgtgagccttttttaaacttcatatcctaatcatatgctactccttgaaagagtcttctaaactgtatagtcaatctgtatagcctatggaagcacaagggaggacctcttctttgctcacctgcttacaaaagaattagaagccactttagctggtttaatacaatagttggattgaccgtaaagtgcttaggtttctgtgttaactcttctagtttgatggcattttcatctcatagttcttaattctgtaattttaactaattatctctattactaatttaactcgagttagaacctgattcccaccctttagctgaattagaagctgttcctttgtgcttccatagtgccccgaatatctgtctagtgtcgtagtattttagcatgttatactgtatgcatttgtcttgctcatttgtttgtgaacttcttgaagggtgggactccgttatgtctcttgggtagagcacaatgctgggtacatgatgggcattgactaaatgtttgttgaataaataaatagcctgactctcattagtccccatcacccctcagttgctggttaaaacttctgactttttaaaaattcattcaatgtgagtctttcacaaatctccctggtgaatatccataccttaaagctggcacacacacgtctagttcttttctctgtcatcataaactattgctgtctcctgcttgcagctgcctctttcattgagttcccaatatctgcagatggctctgtctgatgagctcatgggagaatttaattttccgttctacaatccaaataaattagtctgctataaccccagagctgctggtaaagcagtcgttgcagctttagaattctgatgccaaaaaggggttatatgcacagtgaatgaatagtgccatggggttatgaacagtggttgttcccatcactgcagctgcttgggtgaggcatcagaaaccccttcaagtgtactactgctacagttagctataaaggttttcccagcaccttcagctgccatggtctccacctcagttctctttacatcttattagtaaaatatcttaggaaaaagctataagcaaagatactgtgtaatagctatatggagagtttgacaaacatgctggatagttgcttacaacatttcagtcacctgattctattactaataaaatattttttactgatgacttggctggtaaatggcatgtttatctaatttatgggttcatgcttattactaatgattgcatcccttgatgtgaatctttcagtttttcttgttcatgttagaataattgcatttatctgttaagaaaacgtaacactatatcattgatatgttttctttctttttttcttttttttgagacgtagtctggctctgtcgcccaggttggagtgcagtggcgcgatcttggctcactgcaagctccacctctcgggttcacgccattcttctgcctcagcctctggagtagctgggactacaggcgcccaccaccaagcccagctaattttttgtatttttagtagagacaggatttcaccctgttggccaggatggtcttgatctcctgaccttgtgatctgcccgtctcggcctcccaaagtgctgagattacaggcatgagccaccacgcccagccttcttttttcttttcttttctttttttcttttcgatggagtcttgctctgtcgcccaggctggagtgcaatggtgcaatctcggctcactgcaacctccgcctgccaggttcaaacaattctcctgcctcagcctcccgagtagctgggactacaggcgcgcaccaccatgcccagctaattttttgtatttttagtagagacagggtttcaccatgctggccaggcttgtcttgaactcctgacctcgtgatccgcctgccttggcctcccaaaatgctgggattacaggcgtgagccgctgcacccggtctctttttcttgttttagagacagggtgttgctatattgcccaggttggagcacagtgactgttcacaggcaaaatcattgtgtagtacagcctcaaactcctgggctgtaatgatcctcccatctcagcctcccaagtagctgggactacaggtgtgtgccaccacacccagctactttaatatattttctatgttgatcaaatggtaattctatatttaatttttgtaggaattgccattctattttccacagcagtcaaactgttttttgatggccttgaaactctaaggacagcttggcaggatataatatctttggtttacatttttttcccttaagtttcttgaaagtgctgttctactgttgtcttgctttgtatgttatttttgagaaatacaatgttagtctaattcctttgcttttgtaaataatttatctttttgctcggatacactgagagttttttctttaaataattttataaggatatgtgtgagagttgatcattctgagtcagttttctcaaatatctggtaggatctttcattgtatagattcaagtattttatttctggaatgttttcttggaatgtactttttttttttgaaacagtgtcttgctctttcacccagtctggagtacagtggcgcaatcttggctcactgcaacctctaccttctgggttcaagctgttctcatgcctcagccacccaggtagctgggattacaggcgcctgccactacacccagttagtttttttgtatttttagtggagatgggtttcaccatgttggtcagctggtgtcaaactcctggcctcaagtgatccacctgtctcgacctcccaaagtgttgggattacaggcgtgagccactgcacccagccagaatgtacttttaatattagttctgttccattgttttgatttttttaattagggacaccagtaatactaatgttcaacctcctttgcctatcattcatttcaatcaatttctctctgttttttttaaaattttattttcttcattattttcttgctctttgttcagtgtcttttattaagttttcgttcagtctgttctttctacataccttataatttagtttttatttttggttcaatgccaaagtaaagcaaaataaaaaataatttaataatttaactttcatttcttatatgatgttccttttgtttgtttctttctatttctttaatcagctcttactcatttctttctgtttttgtccattttggtacttagtttttgtacttccgattcaaggtcttcttcatatcctcaaattcttgtttaaaatatttaatccagttcagaggattgtgttacagttgtttttcaacctcacggtttgtttttatggagaaaatcatcagcagaaaagcttttgtttgtattttctgactttgcagtacatttgtatgcatatggtctgcttgtttgtttttaatcattttgtggacagagttcctaatttgagagtgcttcttctgccagtgtgctctcttttgtgaaggttcttttctgaatttgtagtgatgatggtaagaaaagggggagaggaagagttgttccttgattctattaatattttgtttctgcaagctctttaatcctccccccagccccttgccttttcttcttttgagacaaggtctcactctgtcacccaggctggagtgcagtggtgcgatctcacctcactgcaacctccgcctcccgggttcaagggattcttttgcctcagcctcccgagtagctgggattacaggcacatgccaccacacccggctaatttctgtatatttttgtagagacggggtttcaccatgttggccaggctggtctcgaactcctgacctcaagtgatccacctccctcagcctcccaaagtgctgggattacaggcgtgagccactgtgcctggcctaatttcctcctcttatcgcctgtttttttcattcattaccttgtttacaagagaaagcgcttctttatatatgtatacctggttctcccccagaagcactgtttctaggaggctgctgcttctggtccagaagtttctagacacaagacacacttcaccaggtctattagctatcaagtcctaacctcctaacctctgtttagcatttttgtatttattgtttaactctctttctggggctggttttgtctgtgctttttgcaaatcccctttgcccctctgctctttctcacagagtctttttcacctcccttcactctccctatacatccacaggcttgcagaggtaaggaagtggggtttcttttgctatttgctgctttttttttttttctgcttgacttataggtaatttgaaggttgctgtgttttctgtctcctagcagtgctaatgttgatggcctagatcctttgtgggttttaaaaattcttgtggtttattttatgtttgttcagggaaggtgaggaggagaattggagtcagattacctccattgttctacaaacctggaaaggttcaaaaatctttttcgggccgggtgcagtggctcatgcctgtaatcccagcaatttgggaggtggaggcgggcagatcacttgaggtcaggagttcgagaccagcttggctaacatggtgcaacctcgtctctactaaaaataccaaattagccaggggtggtggtgcacacctgtaatcccagctacttgggaggctgaggcaggagaatcgcttgagcttgtgaggctaaggttgcagtgagccaagatcacaccatcgcactccagcctgggcaacagaacgagactctgtctcaaaaaaaaaatccttttccagatgactaattttacacctgaaaaatccaagagtcaactgaacttacagtaaaattactttaagcagtaaaagaattaagttgtgtaatggaatataaaattagtaaaaagaaaaacgtaacttatatgcatacagctaggaaaatataatggagaaccccataagttacaggaacaacagcaaaaaggaaacagagaaaaaactcaaaaccaaaaaataaaatacctaggtgtaactataatagtgtgcaaaacccattgtgttactttcctaggaccaccataacaaaatgccacaaactgggtggcttaaaacaacagaaacttatttcctacagttctgtatgctgcaagtctgcaatcaatttgtcagcagggccgtgctccctgtaaagcctctaggagaggatcctttattgcttcttccagtttctggtagccctgggcattccttggctgtggccacataattccaatctctgcctctgtctaggaaactgccttcttccctctgtctgcatctcttgtttcttttttcctcttaagagaataccagtggctggactctggctcacacctgtgatcccagcactttggaaggctgagttgggaggatcacttgaggacaggagttcaagaccagcctcggctacatagtgagactctatctctaccaaaaattttaaaaattagcccagtgttagggtatatgcctgtatacccagctacttgggagttaaggcgggaggattgcttgagcccaggagtttgaagttgcaatgagctgtgattgcaccactgcattccagcctgggtgacagagcaagaccctgtctcaagaaaaaaaaaaaaaaagttgcaaaatgaatacagagaaatcccatttacccgtagcccaacttcccccaagtggtaacatcttatgtaattgtagtacattggccaaatcaggaaattgacattggtacaatataattgactggactacagatcctacttggatttcactagtttttgcatgtgcccattttttggtgtgtctttgtgtatagttctgtgacatgttattagatgtatagattcgtatagccaccaccacaatcaagatacaaaactgttctgttactgcaagaaggtagcactattgtaacatttaacagcaatagtaaatctatcattgttaaatgaaaaaaacaacatcatagtatgatactattgaacaagactaaaatttaaaaagactaaaaacaacaaaagtgtatttctctacatgcaggtacttatatgaaaatgcatggaatgggccgggcgcggtggctcacgcctgtaatcccagtactttgggaggccgaggccggcggatcacgaggtcaggagatcgagaccatcctggctaacacggtgaaaccccgtctctactaaaaatacaaaaaattagccaggtgcagtcgtgggcgcctgtagtcccagctactcaggaggctgaggcaggagaatggcgtgaatccgggaggtggagcttgcagtgagccgagatcgcgccactgcactccagcctgagcgagagagcgggactctgtctcagaaaaaaaaaaaaaaaaaaagaaaatgcgtggaatgagctctgtgcaaggatatttaccaaactgataacaatgaagtttagaaatgatatttgaggtgttcagatgcggagattttctttatctgtatggactttttaataaccagaatgttttcatgtatctataatttaaatgtttttaaaagaatatatataagaacacaaatataaatgtcagtgaattctgttaatggtattcatctgctagttagaattgtagtggaagtggaggggcaggaattaaggaagacttgctttgtattgtattttcttctgcactgttgagtttttttttcttatgagcatatataatttttttattgaaagaatttttttatggaaggctttataggacatcttgaaaactggcagtaacagaataatgtatatgacttgcttatgtacattttcctatatatacctttacatttaaatatacatctatgcatatacatgtacctgaaagtgtctgtacaaatatcattaggttcttatctttcaatagtaagatttagagtaatttttattttcttctttgtgctcttctatagctttggattattttgtagtgagcacatacatcattcaactttcctttccctttccaaaggtgtttttaagaaggtaggaaaaaaagaaaaaaaaaacctgtatcctgcttgaaaattgagaaaaatgatgacagcttttgcagttaacctttagttagtataaaatttcacgatctccatcatatcctgtggagtctgatagggggttgtgattgttagggattttcaatatatggtacatgaaaaaaataaagtggatgaggagcatatgcaaacaaggcaattgtttatttttctataaggctttttttagtcatctaaaactatttaatactttatattcttaaacatttatacatacagataacacaaatatcctatattttttaaaaccttaaattactttaaaatgaaaactgcttaggacatgtctttttatgatatgatggaacatgtatatagtaacatttatttaaacttcattatacattttgcttctctgtgaccttgggcaagttacttaagctgactcaattttcccttctataaaatggagataactatacctttttttttttttgagacggattctcgctttgtcgcccgggctggagtgcagtggcgcgatttcggctcgctgcaagctccacctcccgggttcacgccattctcctgcctcagcctcctgagtagctgagactacaggcgcccgccatcacgcctggctaatttttttgtatttttagtagaggcggggattcaccgtgttagacaggatgatcttgatctcctgacctcgtgatccgcccgcctcggcctccgaaagtgctgggattacaggcgtgagccaccccgcccggccctattctgtagagttattttgaggaattgcttattaaataccatgatgacgctgattatacagttgtttcattttcatttgaatatagattaggtatttgtataagtacagtcgtattctaaataagcattagaaatggtgctattttcttctccaattgcttccttttgaatgccccatttttgtcatcttggaatcttttgttggtcacagtaatcacattttaatgactcagattgaacatttcatgcttgcatatagttcattatacaacagtttgtctataaacatatattaataccaaataatatttcaaaaagtcggccgggcacagtggctcactcctgtaatcccaccactttgggaggctgaggcggggcggatcatgaggtcaaaagatcgagaccgttgtggccaacatggtggaaccccgtctctactaaaaatacaaaaaaaattagccgggtgtggtggcacatgcctgtagtcccagctactcgggaggctgaggcaggagaatcgcttgaacccgggaggcggaggttgcagtgagccaagatcatgccactgcactccattctggtgacagagcgagattccatctcaaaataaataaataaataaataaaaaataaatgtcatctagcttgttttgatggttcaagtaaagataagtcttaacatttgtgatgctaatctaaagctttgttaaactggaaatgagactttgctaagcagcatatgtgtaacaggtgatctgatccatgtagtcattgtgcatgagtgaattaatggtttaaaatttgacttgtactgcttgataaaagaatgtttctattaggttcttggcagggtctcagaatgtgattttattcttagtttgtgtgctctcatctaatattgcttctttgggtagggacagaagtaagtttttgccctcagtcttttgttttcagtaattaagaacaaataatacatattgataatctgttaatattgcataatatatttgaaatgaaagtagcctttaggtgttattgtagaacatgtcaatccagttttggctgggtgtggtggcacgtgcctgtagtcccagctactcaggaggctgagacaagaggatgtcttaaggccagaaatttgagaccagcttgggcaatatagcaagacctctgtctcaatttaaaaaaaaatcaatttgccagggagtgacagaagaattctacctcagtgaatttatttggtgagatagcactctgtatccaattttcttttagtattaagctgcttgttgtcaatcactttgtcaatgtgttcacctgtaacagtgttagcccatttgctccctattaccacgtctttctgctaagtataattggctcctagcctgaaaatcaaagcacatatactaagaagtttatgctaaataaaacgtataagatgagggaaggcctaaggacttgagttactaactagtacatggttttgtgaaagctgcgttgagctctggggaattttttttgtttttcttatttctgagctgagaatcttgttacagaggtttaaggtggtttgactgctagataaatagatagtgaatagaaacttatttggtatagtcaagaaatgagtgagcatttcagttactgaagaattacaagatatggctaatattactggtttttaaagaattagaatgcaaataatttttacttaatctttggtgaatttggttctgtctttggttcagatgctgtagctctctacttaaaatcattctgaggcttcccactcatctgatttaatttttttttttttagacagagtcttgctctgtcgcccaggctggagtgcaatggcaccatctcagctcactacagcctctgcctcctgggttcaagtgattctcctgtctcagcctcccaagtaactgggattacaggcacgctccaccacatccagctaatttttgtatttttagtagagatggggtttcgctatgttgtccaagctggtctcaaacttctgagcgcaagtgatcttcctgcctcagccccccaaagtgctgggattacaggcgtgagccaccacacccggccaaatctgataaaaattttgaaaaatcagtatcctgcatggtctggcttcctacctcatctcttagcagcccgttgccttgccctttgtttttcggcacgtattattaggaccttccttagaccctggaacctcccacatacttttcttcctttgatctttccggtgctgttttctttgagtagaatatatccctctctctttgccagtggtttactcagtttgtgtgtttttttttctttttttggtgagctcagctcaaacttgacttcttcagagaagtcttctgtaaaaccaccagagttcaagtcctctattttacatgtttatatgaatctttttttttttttttttttttgagacagagtctaactctgtcggccaggccggagtgcagtggcacgatctcagctaactgcaacctccgcctgctgggctcaagcaattctcctgcctcagcctctgagtagttgggattacaggcatgtgccaccacacccggctaatttttgtatttttagtagagacggggtttcaccatgttggccaggctggtctcgaactcctgacctcaggtaatccacctgcctcggcctcccaaagtgctgggattacaggcgtgagccaccgcacccagcctgtttctatgaatcttttatgtctccatcatagcacttgtagtgactgtcattaagtagttaattgtgaaatttgtcatttaatgcatgccttcatagctgaaatataggctccatgaaggcagggactgtcattgttttccatagtatctttaaggatgagcatttaatgctcagtatctttttttttttccaaggcagagtttcactctgttgctcaggctggagtgcagtggcatgatcatggctcactgcagcctctacctcctgggctcaagggatcctcctgcctcagcctccagattagctgggaccacaggtgtgtgccaccatgcctggtgaatttttttgtattttttgagagataggatcatactattttgcccacgctagagtgaaactcctaggctcaagcagtctgcctaccagggcctcccaaagtgctgggattacaggtgtgagcccctgtacccagccaatgctcagtatttttaatacttagtgtttgacgggtagctggctatcaataagtatttatccaataagtaaatgaatgagtagtgcttagataacattattcatgtatctcattatgccattattcattattatataattctgagcttttttttgttttttttttgagacagagtctcgttctgtcgcccaggctggagtacagtggcatgatctcggctcactgcaaccaccaccttccaggttcaagtgattctcccgcctcagcctcccaagtagctgggattataggcgcttgccgccacgcccggctaatttttgtatttttagtagagacagggtttcatcgtgttgaccaggctggtctcaaactcctgacctcaggtgatctgcctgccttggcctaccaaagtgctgggattacagacgtgagccaccgtgcctggctgcattttttttttcttcaatttttaaaagtgagcaatggactgggcgtggtggctcatgcttgtaatcccagcactttgggagacttagatgggtggatctcttgagtttaggatttcaagaccagcctgggcaatgtggcgaaactccatctctacaaaaaatacaaaaattagctgggtgtggtggcatgcgcccgcacctgtagtcccaacgactgagtaggctgaggtgggaggatcacttgaactcgggaggcggaggttacagtaagttgagatcatgccactgcactccagcctgggtgacagagtgagaccctgcctctaaaataaagggagcagtgaacataaaaataagtctctttttctgtttaacgtgtaaaatgccaatggttctaggaagaacagcttttagtaaataaaagtgttttttttagaaaaattcttgcgtactatttttttctgctaaaaattaatgtaactaattgtgctctattataactttttaaaaattaacgaatacaaataaaatgctggtcccaggatgctttttgttcatgaaagaaaaatgacattcaaaacactatgtagctggccaggtgcagtggctcatgcctgtaatcccagcactttgggaggccgaggcgggcggatcacctgagtttgctagtttgagaccagcctgaccaacatggtgaaacaccatctctactaaaaatacaaaattagccaggggtgctggcgcatgcctttaaccccagctacttgggaggctgaggcaggaggatcgcttgaacccaggggccagaggtttcactgagccgagatcgcaccgttgccctctagcctgggtgacagcgagactccatctcaaaaaaaaaaaaaaaatgtagcttactgacatttcagatgtgtgatgtgttaaatgtctgcatggcctttcattttctgctgccaagtcatactgaatgggattctcgtacatttttaaaggatggaaataaataaaatactgagtctataattcatttaacaaatatttcttgagcttcaaccatatgccaggcatttgatatgtaagggtgaacaaaatgcacagggttcctgtgctcaaggaatttatactttagttggcagagacagaccacaatctgattatcacagaaataaatagacaatggcaacccagtgtgtactattaaaggagaaagtaggagagcaataggttgataccccttacctagactgggtagtagaaaacggatgtttttcccggaggaagtgacacttgagaaaggatctaaaggaagatgagtttgtcaggtaaaggttccagacagaaggaacagcatgtacagaggcccttgaggcaggaggagcacggttttgaacttacagaagccaatggaactggatcagaaaagaggtgtgggaaaggagtttaatagagctggagaggtaggcatataccacatcagcatcctagacaacattaaagatttgagtcattaaaatgtcattactgtcaccagtttagattatgaaatctaaatatctgtcagtagaggctagtcaaataaatcacagtataacgatgtaaaggaatactgtgtagctgtgaaaaaagtgaatgaggaaatttacaactgtcaagttgaaatatagagacaaatctctgagattaaaatattttatttgagaagaaaattgcaggccaggcatggtggctcatgcctgtaatcctagcactttgggaggccgaggtgggcgggtcacttgaggtcaggagtttgaaaccagcctggccaacatggtgaaaccccgtctctactaaaaataagaaaattagccatgcgtggtggcaggctcctgtaatcctagctacttgggaggctgaggcagaagaatcgcttgaacctgggagggagaggttgtagtgagccaagatcacgccactgcagtccagcctgggtgacagagccagactctgtctcaaaaaaaaaaaagagaaaggcaatttgggaaatacacacagaccatgtggtcttggctgtctgaagaacaaagaggttagaggttttataaaaaggagaaatgttacatatcactcttcaagaaagctcattggcactagtaaggttttggggagctggcaagctctgactggcatgtaatcaactttcacgcaacctactcaaaaaataaaaattcaatttaatattgaaatttcaaaaaacggaattgaaaaggagaaaaattctatggcatatgtatatgtcctatatgagattttaaaggattctttcagcatagtaggttatcattttctctgaatttattgtaataataattatatatcattttgttataatatcttgagaatatatttattatatctcaagtcagatatattttgtaaagtattatagtagttaagaacacttttgctggtgtgagatcctgagttcatattctggcactgtaatttgtacagttggttaactgggaaaattgcttgaactctctaaaactgttttgtcttctgtaaaatgaaaataatactatttatctgataaagttgaggtgcgaatgatatgatatacatgtgaagcacttgagagaatgcctagatatgctgctcacgtaagaaaaagttacatattatccctttctatgaaaatatcttctagggccgggtgcggtggctcacacctgtaatcccagcactttgggaggctgaggtgggtggatcatgaggtcaggagttcaagaccagcgtggccaacatggtaaaaccccgtctctactaaaaatacaaaaaaattagccagacgtggtggcacgcgcctgtaattccagctacttgggaggctgaggcaggaggattgcttgaatccaggaggtagaggttgcagtgagctgagattgagcaactgcactccagcctgggtgacagagcaagactccgtctcgaaaaaaaaaaaaagaaaagaaaaaaaagaaaatatcttctaattaataccacatctcaaaagtttgaatgcacagagagaatactgaaaggatttatgccaataagttattgtagttgcttctgacaagtaggattatggctgatatttgtttcttgctttttgttttgtgtattttctaaattatgagtcatgagcatgtatttaaaattagtaacatctgccatttaaatatgctacctttcctattaatttttagtagcagcttttttggcagtgttagaaagtctacacatcctgattcaaattatgttactgcttgattctacaaatttatccataactttgtgctttcttccttgtattttgattaattttaaaaggctttgtggctggagctgctaaattgtgattggaatgggaaagggcttgcattttgagaccatctgtgggagttgcattgtctgaaactgacgagatcatggcagatggcaaggtcaaaagattgactttttgagcttgacataatgtgttcatgaagctggaagaagaaatccaacttatttttttaactaacagaagagcttggtgacaggaagaagtgtgcaattgttgagtctggataaaacataatgcatcagtgcacatgactggtttatctctgagaatcatccatactgccaaagatggcaacttcttgaacctttctgtgccaaatttatttaatttctagacactttggaaagtttaagtcatacaatgcaaataatttatagattaaagacaatgtcaaaaaagacaaaaactttaaaactatttagaaatgtgtatttttaaattaaaatgctataaagtatcactcaaagccaatacagcatacttaatttttaattgaatgaagaaagtctctatcacaatcccatttgtttttacaatgtctatcttaatgtaactttatttctttaaaattacatttgaacgtttggtgattacagtctttctcatctactaggctgtcttcattgcctgagatagtgccatgcacatagtgactgttcagtatttgctggatgagtaatgaatgaatgaagttattgcctactcttgttaattttagaagagtttttttttttaacacaattaaacaggttttttttctattttgaaattgggtttatgttatggtatttttcacttctaccatgtgggaattatgtattatttattttagagaaggaagccttagtttgtcatgagaaatcaatgaacagatttttttccccctctaacattgaatgcttaacttgtgctaggcagtgtcttagtaattttacatgtattgactcatttaattaagtggctgactcttactattttagagatgaagaaattgagacacagagatgttaaggtaaatttgcttaagaaatccatgcgctttggctttatttcaaacatttattatttaggtaatacttagagattccagtttgtgctgtactctggtgtggagagtcaaaggaataccaaacaaaattgtactttgttctgtgaagctcattaatatggctatttttattggtaccctcttactatattgtgctgaaatagtaatactctgttaatttcattttatttacgtgaataacacagtgaccctcattagcccagcccttaggaaatataacatcattgagtactgaattcagaaatggagcagatgcccggagacaagcagctctagccatcacaactatgctctgggcacaaaaaaacacaaagggtggggaaaaaggacacctactagttgaatctggtagcccacaccaacaatgtctgcttatatttcattggccagaattatgttatctgtgatatggttagcccatctgagaggaaggttgacgatgtagtatttgtagttgggggcacattgccacttcagcttgtaaggaagaagaggaaaatgatattgggtaggcaatagtatttgctttggaaatatagagtgtttctaaaatgtaacatgttcaaaccatttgatggaaaagacttagtagtttttttgttataactgtatttcagcaggtcatgagatagtcttaaatttgttaaaattgaacttttttgttgttaggagtgttcagaatatgtataaactggagggcgtataaactcttaacataactctgaaacattcagtgtatcagtttttcagatgaagacatggaggctctaagaggttaggttacttgttcaggatcacacaactaagtatcagagctgagacggagccaaagtccatactctttccactctactgcactgctgctttatttattagatgctgacttcaagcaggacacttacaaccaggctgttaatttgttgattttttttctatttcattaatttatgctctttgtttcttttcatatttctttgagttctcactgttcttttacgtatttaaattgattgatggcttaatgaataaaaagaaatataaatataccctaagtactagttctgctggattttataagttttttaaaattttcattgtcatttctttctgaatattttattttttaattgttattctagttctaaatatttcacattcatggagtgtttaataatatagctaaatatatgacttttaactttctaaaaaatagttgattcctaatttaattgcattgtagtcagagaccataatctgtgtaatatttcctctctgaaatttttgcttccccttggtgatagcatatatggacaaattttataaatttgtgcctaaagagatgtttcagatctattagatacagaattctgtatagatctgttagatcaagcttggttgaaatattaatcttcaaaatgcaatacttaacattttaactttaaattattagtttgaatatgccaggtagtctgttgaatgggatatcaggaatttgtgctttattatttatcttacatttaaatttatatcactagagaggacgtaagaaataattgataaatgtagaacagatatagcataggaactttatttttagattaggtcataatagacattgtacaactactgtaagcaaaacttgtaattgtggttcaggttttacttcgatttttaaatttatgctttatcattgaaaaattacaaattcagtgttttattgaaaagcaaaagaaaggaggggggagcatcaggacaaatagctaatgcatgtggagcttaaaacctaggtgacgggttgataggtgcagcaaatcaccatggcacacgtatacctatgtatacctatgtaacaaaactgcatgttctgcacatgaaaaaaacagaaaaaaaaaaccttgcttttcttctacaaaattttacttgtagattcaaattctaacatataaggcagccatttgaagcccccatttctttgaacacccattatttatgatctttgcaaagttaagttttactttatccttccccttgaatgtcttattaaagtttaattttgagataattttaaaataagagaaaagttacaaaaataggtcaaagaactcccagatgcccttcacccagattcaccagttgtaaccattttgtcacatattctttattattctttctctgtatagtgagaccatattttgtcatcatttgagagtaagttgccaccattatacccctccactcctaaatattttagtgtattttttataagaaagaggacactcaattatagaaaactccatagtttttggaatccaaaaagatgtgaggaaaagaaaactccaagttcattgatcaaagtcaggaaatgtaacattgaaacaatactattatccagtctgtagatctaatctccaattacccaaataatggtcttcacagcagttttttttttctagttcagtgtcctgaccaagatcacaggttgaattcagttttcatatgtttttagtctttttttaaattttttatttatttaattttttttgagaaggagtctctttctgtttcccaggctggagtgcaatggcgcgttctcggctcactacaacctccacctcctgagttcaagcaattctcctgcctcaacctcccaagtagccaggactacagacacgcaccaccacacccagctaatttttttgtatttttagtagagaaggggtttcaccatgttggccaggctggtctcgaactcctgacctcaggtgatccactcgcctcagcctcccaaagtgctgggattacaggcgtgagccgctgcgcccagcagtttttagtctttttaaatctggaaagtttctcagcctttctttgccattcatgacactaacattttttgaagaattcaggccattattttgtagaatgcctctcaatttggatttctctgatatttcctcatgattaaatttagattttgcatattgggcaaacgtacctcagaattcatgctgtatccatctcagtgcgcttgaagagacacatgttggcttgccccattattggtaatcatttggtaactttgatcacttggctaaagtgatttatgccatatttctttcactagaaaatttgaattagtaggtattttgtagggagatatttcaacgctatggaaatatcctatttttcaccatattttcactgactagttttactgtgtattaattattcttttcttattagttatgatggttccaaaatggaagttttactaactgtatcactcatttatatttattagttggcgttctactgcaaagaatttctcatctccccctttagccccagtaatcctggattattattttattcaatgggtttataatctgttactatcattatgtactttggtgttcagttgttgaaaattgtccagctgtaggctctattcaatgggtttataatctgttactatcagtatgtactttggtgttcagttgttgaaaattgtccagctgtaggctctttaagctgatttctgtgtacttttgacatgtctccatcattttttgagcccttccttactttaggcacaataagatgttctaggtttatcttgtactagaatcagccatttctccaagaagccctggtgtttctttcagtggattttctaaagcagcatagcctaataccatttcaaagcccaggctccagcacttgtgaactgagttgacatggtcaaattagttaacctttctaagccctagtttttatttggaaaatggggattaagatggtacaaacctcatagtgttgttgtgaagattaatttagacagttcacttagataacaatgcatgtcacatagtaaatatgacataaatgttgcctattattattattacattactattccctctgttttcctttaacaggttgttcttttaaagaattattgaagacgaaggtttttttctttttatttttttaatggctttacagaatcttaaatagaatacagtttgacatgacggcaaaaaatgtaagtatttgtaaattttttaatgtaagtattgtttaaagtgagctgtgctttttcctacatattttctcaccattctggttaaccagatttaatttacttgcatggatttataattgtatttgtttatgtttatgcagaatatgagataagctttaatgcgattgaatatggtgccctaatggagatagtagcattcttgcaaattggcaccaagttacttctcaacagctgcaaattgctatctccagaaggtttcccaccctgccctcctcttttggatattgtaataaatttgttttggtacttgctggagggttacttggcctttttgagcaaatcactgttttctttggcttattttttttttttttttttggttactcagggaaatgtatgtgctcagatattgtctgaaagtagcttgctaccttccatgagatggttcctgaagaaacattagattttagatgttttggagaagttattcaagtttttccctctacttgaggtgatcatttctgaatatacctcctttcaagttgtatgtcactctttatttatttatttgtcactgtttattaatgagtttgtttccagttatggtaaagaattgtgccttaaagagtacaacatataggggaattatttataaattgctttactgttccaatgttatatgtattaaagtctaattgctttactgttcctatattattatgtaggaatctttgactgggaattaaacaaaaagggaatttgttataaagatgcagggatatctcaaggaatttaagagtgggaattttatgggccctcagaaagatccaggcccagaaactagaaatccagcaggaattgaagcagtatttggttttcatttctcatctctctcagcttgttactgtgtacctgcttcatttctccctctgtctgtctgtccaaatcatctttctcagttccccagccaggatggtggaacatggccccactcagcatttccatctatatgttaggggaccagcctgttcagagagaggtgtgaagaaagggaaggaggcaggccaggcatggtggctcacgcctgtaatcccagcactttgggaggccaaggtgggcagatcacctgaggtcaggagttcgagaccagcctggccaacatggtgaaaccccgtctctactaaaaatacaaaaagtagccaggcgcggtgacagacgcctgtaattccagctactcgggaggctgaggcaggagaatcccttgaacccgggaggcggaggttgcagtaagctgagattaccccattgcactccagcctgggggacaagagcgagacttcgtctcaagaaaaaaaaagggaaggaggtagcttgatgcatcctgcctgcctttctagtttcagactccttaggaggagcctctggcacagttaaagtctgatgttgactagtgctttagttagttgtgaccaggagaagcaagtgttgttgcatgaaatggctgctgagggtccagcacagtgtgtgaggaaagatgataaagggtttcttgtgagtcagaccgatagttctaaatattgcccattatgcagccgaacaatagcgttaacaaacaaatccttattgcattatgtctgtttgcttattttgggttataattcagaacattgcttttaacatgcattggtaactagaagcagatacagattttgcttcattatcatttggggacagtcatcaagatttattgagtcattaggatatgagggcaggaaagaagttagagacttctcagtatttgacttgtgtaactgggtaaatgactgtgctgtttaattagaagaggaattcttagggaggtataggatattgtgataaacttaaatattctgttttgaacatactaaagttgagaaacctaaaaacttccaagtggagatattggctaggcgatttgataagtgactctggcgctcaggggaaagcttaggaatggaggtagaaatttttgggtcatttctttttttttttttttgaaatggagtcttgctctgttgcccgggctggaatacaatggcacaatctcagctcactgcaacctctgcctcccaggttcaagtgattctcctgcctcagcctcccaagtagctgggattacaggcatgtgcaccatgcccggctaattttgtatttttagtagagacggggtttctccatgttggtcaggctggtctcaaactcccgacctcaggtaatctgcctgcctcagcctcccaaagtgctgggattataagtgtgagccaccgcgcctggcccgggtcatttcatattaaaatcattgtaaagcaatgggactacatgtgatcatatagtgagtgcatggatagcaaatatataaggaccaaggtctgagcacagggattctccaacaaaaaggtggaaagcaagagaagccataaaggacactcaaagaatgggcaaagacaggaagaaaagagttatcctgatgatctggaggcccaggtgaagaaagtgtttcaaggggaagtgatcaattgtgtcacatgttactgagaagtgactcacaaacacagaagagattgtagatagggaagagattgccctcttacagaggcattactaaccatgtattcaaatatgtacattttaaattttctcattttacatgtctctgatgacaacagtttttttgtgaagagttacttttgtcttatccatgctttattaggtctcttatagttgcaaatgatcgaaaccctatcaaaacagcttaacacaaaaagtggaatgtattgacttatataattgaaaagtctagaggctgcttcaaacacatctagattccagggatcaaacgatgatgtcaggggtctgtcttcttccatctttaggccttctgtatggtggcataatggcttgcattggcctcataatacttgtctcagaaggagagagagaacttttgtgttttaaagagatggagtctggctatgttgcccaggctggtctcaaacccctgacttcaagggatctgcctgacttggcctcccatagtgctaggattacaggtgtgagccactgcacctggcccctttttagtatttatgtttcaaaatctatggagaagtttgagttgaccttgcttaaactccgtggagatggaagtgggatacggtaagtggccaggctttgagtcatgagcccactttgagcctctaagattaattgtcttactagaactacatgagatgtaggattgatcactttgcaaaaggaagaggtgaggagctggcaacatatttattgtatctggggtgaaattgctatcaaatagtatctagtatccagtaatatttttctagaccaaaaatgcagttgtgttctaatttaagcaataatacagtaaataatttgaaatataatttttgagggttttttttttttgccttgtcaatgaatctttaagaaaaacatgtaggctgtaatactcattatggaaaaattagaaaatacagataaagaaaagaaaaaatagcctagagactgtcagcaaaattttgcttaggaagatatctgatttgtatacaaatttgtatatgtagcaatcaaaatgtatagacattggcccagcgcgatggctcacgcctgtaatccgagcactttgggaggccaaggcaggcgatacttgaggtcaggagttcgagaccagcctggccaacatggtaaaaccccatctctactaaaaatacaaaaattagctgggtgtggtggcagtgtgcctgtaatcccagctacttgggccagaggggctgaggcaagataatcacttgaacctgggaggcagaggttgcagtgagccgagatcgtgccactacactctagcctgggcaatagggactataaattgctgggtttatggacatgagccaccgtgcctggctactatttaatttctgtgatgaatgcattttcttatcttgatatctctggaacatcattttaagtgtctattttagtttagtttagtttgggacagggtcttgctctgttgccccggctggagtgcagtggcatgatcatggctcactgcagcctccacctcctgggctcaagcgatgctcccacctcagcctctccagtagcggaactacaggcaccttgcccacttaatttcttcttttctttgtagggacaggatctcactatgttccttaaggctggtctcaaactcttgggctcaagcaatcttcctgccttagcctccctaggtgctcctattacaggcatgagccatggtgcctggcctaagtggctattttatgttatttattgtatggatattacaccagtttcctaatattgaccattaagttacttctgcttttttcctttttggaacattttgtctgtttttgctcactcatcatattatctccagaagaaaaattctatgaaattactgagccaaagtgtgtataattttttagagcttttgattcatattgctaagattgcacagatttatatatatacttgtggtatatgaaagtgacatttctttttatatgtttataaatctttgccaatttaatcagcaaaaaatggtgtgcaatttattacatttctctgattactagttaagtaaactaacattctgtatgtttattggtcatttgcatttctcttttgcatatggtctgtgtcagggttgaagtgttggaagccattgccatttggatgacaacccacacttaaatattgctttggcatattaatagatatatttttgccaaattaacagataaatttacataatcatttgactcgatcctatgagctctttagtttgtcttgcacatacgttctatcattcccattttgtagtgaccgttccacgatcaccttgcctgtgaaaggtagagcttaactgagcacagatgatcttactctgaacatttcagtaatgttatgtcagtcagaaatgttgaatatcaatgaaattacaatattattagtcaatatgatctgattcttaaaaattgaacttaaatactttgaattcagtaaacgcatagtgactggttatatagtacacaacacagcattggaatacccactatagtaaccattttatatatatgtatcttataacatcatgttttataccttaaatacagacaatacaatttatttttaaaaattgagaaaaaagagaggaatactcagcatattttcctcaggacatgattaggcaaagaatttaacatgaaatatgagttcacttttttctcttgttcattgaaagataagtcctttttaaataggtagaataagggaagaatggctaatattttaggatgctttcgctagccaactttttctactctcaaataatacagtttttttgaatctttacaaaatgtttatgatagtagaaattaatacatattttgaagttttaattaaatatattttggttttatatataagctttaaatacaaacacctcccctccatctatgagactaagattagcatgcagtatggactcacaattgacttttatctttttggagtacaatttgttggttcttaagatgcaggtgtacagctgcttaaaaagtttccacattcgttggctgttttactctgcagaagttggatattaagagcaggtgtttaagcataacggtaacccagtaactgaactctctattatgaatatgtggttttagttgaggtttttgaggtttagttgaggttgtataataacaaaaaggtataaactgatccttttgaagttattataatacatgtatttaaatggttatattgtatcaagcatggaatttattaaaggctgtctttgccttctttgctttctttttaaagtagaacaccaacaagttttgcctctgtcatcttcctatagcagaagagtttaaaaaggaggggggagttattagtaatggcacaataaactcttcaacaaatcaacaagttggatatttaacattatttgtgagcaactgaagagccataacatatagttatttgttgcaaattttgttggaaagtattgtctttatttctaactgaaaagtgataagaagctggacaaagttaagtatctgcactattatctacatagaattaagaggccattttctagatgacttagtctcagctactgtcataaaaatttgatgatgatagattctagagatttgcatcaaaatcacttgttaggatatgaaaaatatgtaaaaatattactgctaacatacttcttgacagaaagaaacagctattagtagagcatttgaattcttagtagagcattgaattatcaaataatgaaataattagctcttacattgatattataaactatcaaataattgcttatgaaaaatataaatacagccaggcgtggtggctcacgcctgtaatcccagtactttgggaggccaagacgggtggatcacttgaggacaggagtttgagaccagcctgaccaacatggtgaaaccctgtctctactgaaaatacataattagctgggcgtggtggtggacgcctgtaatcccagctacttgggaggttgaggcaggagaattgcttgaacccgggacgcagaggttacagtaagccgagattgtgccactgcactccagcctgagcaacaaaaacgaaactccatctgaaaaaaaaaagaagaagaaaaatataagtagtcagtgtttagaacaataagtggatagttataaagttataaagctttgtgtgctttaaaatcttttcagattgctggagatctgatgtgctgcacagtgatgataattaatagtactgtattgtgtgcttgtaatttgctaaaaggatagatcttaaattgaatcttcgcaacacacatatacacaataatagctatatagaggtaatggatatgtcagcttgactgtggtgatcattttacaatgtatacatatatcaaaacatcaagatgtacaccttaagtgtatgccatttttatatatcaatgatatctcagtaaaggggttaaaaaatcctttccatgtggtagtgtcttgaaagtatagtttgagggctgggcgtggtgactgatgcctgtaatcccagcactttgggaagctacggtgggcagatcacttgaggtcaggagttcgagaccagcctggccaacatggtgaaaccccttctctactaaaaatacaaaaattagctgggcgtggtggcaggtgcctgtaatcccagctacctgggaggctgaggcaggagaatcacttgaacccgggaggcggaggttgcagtgagccaagatggtgccattgcactccagcctgggccacaagagtgaaatgccatctcaaaaaaaaaaaaaaaagtacagtttgaggtatcataccacaaacttgtgatgttacaagttagtgtaatgtaacaaaattgtaatgtttcaaggttacaaatcttcaatgcttacaaaaagtatttgatagtaataatagagccaatttttggatgtttgcgttctgccaagttttcaaaaattgagggttttttttcctccaggctttgtaatatatttctgatattctgtttgatgatattcctgtattcagctctgtgatgccaagtagtgtagtggatattaccttaaatgaaataaattatctaaaagtgaattcataaatacttgctgtgggtagtccctcaagtataatactgacagtaacgtatgctgacatggattgagcagtatgtgccaaatcttgtgctatatgctttacatgaattatctcatttagtctttataacaacctgaattgctaagtactggtatcaccctccaatttacagatgaggaaatgcatgacttgaccaaggccaaacccctagtaggcttgatggtccagaatatgaatccaagcagttggacttaaggccaatgtattttacttctgcattgtggtattaatggtctttatttgattcctcacatgtcatagtattgaaagcattttagatagtgattaagaatagtacaaattaagggcaacagtggggatggaattttgaaatatctattggcaacttcatggctgccacattacttacttgctttcaaagaactgtcagtaaaatctgtaaaatctcagttctgctcataagtaatagtatttcattaatttttatcttaagctggacaattcatattcccctcaccttttttttttttgagacagggtctcactctgtcatccaggctggagtgcagtggcatgatctcagctcactgcaacacctctgcctcccaggctcaagcaatcctccgacctcagcctcccaagtagttgggactacaggcaatattcttccccttttaaataatatgtcaacatttcattttaaaataatactcctgtggttaatataattaattcatttgatgtggctatatatatttgatatggatgtctgatggaagatataaaatagcttgttaagtgaacacatactacttaatattctatttttaactttttaaacggttttattcaggttggtttgacttccacaaatgcagaagtaagaggatttatagatcagaatctcagtccaacaaaaggtaaggattattgaataaaatttttctgaattaagttagttttattgcatttgttttgtaaaatatgcagctacatgaattactttatgtataataattttatgatattagcacgttgttccatgccacataacttgtgctgtatgaaagtcatttacctctgacagacggaggatttttgtgtgtgatttttctctttcctaagagatctctaagatcccttatcaatgatcttattacaattgaaactgttcagaccacttttttcttgattttcttgtttgacaatcctactttcaaatggtttaagttgtaaggaagtacagtagagaaaatacgtatatatgtgttttgtatattttatatacgtgtgtatgtgtgtatttctttgactaatatatgtcttactggaagaatgcttatatcagaaatctggcccactggcttggtgcagtggctcacacctgtaatcccagcactttgggaggccgaggcagaaggatcacttgagcccaggagtttgagaccagcctgggtaacatagtgagactctgtctttacaaaaacttagccgggcatggtgatgtgtacctgtagtcccagctattcaggaggccagtgtaggaggattgcttgagcctggaaggttgaggctgcagtgagccataatcatgccactgtactccagcctgggtgacagaatgagaccttgtctcaaaagaaaaaaaagtattctgacccaccagtacaagaacttacacaggaaccagcagtatctttcaatatgtctctttgaacaatatcttgtggtatatagagatacatgctgaaatgtctacggatgaaattatatgatgtctggaattggcttcaaaataatccactaggagaaggagggtaaagtgggtggtattatagataaaacaatattgtcttaagttgattatttgtttaagttaggtaatatttctgtggggtttcattattcctttcctttctcttttgtgtatatttgaaatttttcattataaactgtaggaaaaagatctattacaatacaaatagctatgagagaaacatcagcttccttaaagggtttatgtctaaggtgggagacgtactctagagcagaggtccccaattcccaggctgtgagctcatggcctgttaggaaccaggctgcatagcagaaggtgagcggccagcaagtgagcattagattctcataggagggcgaaccctattgtgaactgcacatgggagggatctgggttgtgcagtcctttagagaatttaatgcctgattatctgaggtggaacagtttcatcctgaaaccatccatctctctccacccccatccatggaaaaattgtcttccacgaaactggtccctggtaccaaaaaaggttggggaccactgttctagagagcaggctagagacatctatattccaatataaaaatgtctagcttattttattttatttttttttggtggcagagtctcactctgttgcccaggctggagtgcagtggcatgatcttggctcactgcaacctccacttcccgggttcaagtgattctccttcctcagcctcccaagtagatgggattacaggcacatgccacaatgcctggctactttttgtatttttggtagagacagggtttccacggtttcaccttgttggccaggtttaagccaccacacctggcctagcttaataatagtaatagtctgtgggaatgattctgagagttaaggtatgtattatgaggccatttaagagatactttaagcctcaatgctcctcattttttttcccacatgacaacattcatagaaaatgataacatttgtgggatgcactagggctaaacaaaaaggctgcttaaggtcaggattaagctacctagaagcttcagctgcccgaggccactccagactgccgtgagggctgagggactccattcttttgtatacccatagcttattcacaacacgtaactgggaatctctgctctaataaaacgtagtaatcaggtcaggggaaggaagtgggaacaacaagcttggtagacatggaagacatattgagtattgcaataatgagaataatggaatgatgcagcaaccttgaaaataaagagaggatagcaagtcataaaggggaaaagtgacatggaaaaatgcttttggctgggcatggtcgctcacacctgtaatcccagcactttggggggccaaggtgggcggatcacctgaggtaaggagtttgagaccagcctgagcaacatggtgaaaccctgtctctactaaaagtacaaatattagccaggtgtggtggcaggtgtctgtaatcccagctactgcggaggctgaggcaagagaatcacttgaacccaggaggcggaagctgcagtgagctgagatcatgccattgcactccagcctgggcaacagaatgagagtctgtctccaaaaaaaaaaaaaaaggaaagaaagaaagaaaaatgcttccaaaagacagaagacaaagaaagagaatgggggtttaggtgagaaagattgtctttgatggtagaataggcatctgaagggtaagtactagttataaatgttagccctggacagatgttaacaccagtaaagtttagttacagagtaaaacctcagtttgtttaactttatagaacaaatggagaggaagacagagaatcatttaagagtggactagagagatcagattttgaaatagctatatgcatgtgtttgtttttgagacagggttttgctatgcccagggtggttttgaactcctggagttcaaacctctggagtagctgagactacaggcatgtgtcactgcacctggctgaaataattatatgttttaaaagaaaactgttgctcttctttgagctgttagctagtaacagcagaaggaacttcacattaagtgaaccaacaagatttggaagagatttcttttaattggtaaaattcagttaatatttgttacaggcccaagatgagagttgtattggaagtgagatgtagaaaagtatttttcttaattgaaatgatgatgtagcaatgatattatagaaacttttgaaaaatagaaaaaaaattctgcctttctaatacaaccttttcttttttgtaatttttcataattatttatataactatgttttaaagttataaaactggtaagtattatagttgtctattttccttttttgactgaatctaaaaaacacactttgcatgttttcacatttataaatacctttcttagagcttcatactgtttcattgtgcttatgagtaatgatttattaaacattttttcatttccttattgttggatatttgtcttttttgttggttatatatgatgcatatatatttctatatatgatataaacctatgatgttggacatcataatgaatctttaatcagctaagtttttgtttctttttatttattaagataagtactcagaagtgcagttactgggtcactcccctgcctaattaaacccttttaagcaacttcctatttaaattaaaataaaatcccaaatcccttacctgcaacaccctgaagttaggtcctgaagttaggttcatttttttcctaccatttttcctctgtgttcttcacatatgacaattttcattaatctgtcttcaagttagcttattttttttcagttatcactattctattaatcctagccagtgattttttttttcagacgttgcatttttcagttcgagaatttccattgggttctttatgttttttttttttctactgaggagagagggtgaaagcacaaatgcaagagcattgacaaagaaattgtagaatgttagagcagcactgaactcaattgaggttaaatatcttaaaccctgctggacgcagtgactcacacctgtaatcccagcattttgagaggctgaggggggtggaacacctgaggtcaggagtttgagaccagccttaccaacatggtgaaaccctgtctctactaaaaaatacaaaaattagctgggcatggtggcgggcacctgtaatcccagctgcttgggaggctgaggcaggagaatcgcttgaaccagggaggcagaggttgtagtgagccaagatcacgtcattgcactccagcctgggtgacagagcaagactccgtcaaaaaaaaaaaagatattaaatccaggaggtcgactacttttgtccagcagcactgataagaaagatagctggtctgggcacagtagctcatgcctatgatcccagcaccctgggagactgaggtggaaggatttcctgagtccaggaatttgaggctgcagtgagctatgattgcacaattgcattccagcctgggtgacagagcatgaccctgtctcaaaaaaaaaaaaaaagaaaaaaaaaaagacctggcgcagtggctcacacctataattccagcactttgggaagttcgagcccccagcctaggcagcatgatgaaaccctgtctctactaaaaatacagaaattagccaggtgtggtggcgcatgcctgtaatcccagctactcgggtggcagagacacaagaatcacctgaacccgggaggtggaggttgcagtgcgtcaagatcacgccaccgcactccagcctgggggatagagtgaaactctgtctcaaaaaaaaaagagaaaaaagaaaaaaaaaagatagctggactgctccagggtttcgttatatccagccagtactacagaagggaaaacagtatagatgtgagacacatataaagattgttttgtggcaagaaatgagacctgagaggtaggccacattctttcattgattcagcaaatatttattgaatagtacttacttactatgtgccaggcatttttctaggtgctaaggataaacaaggaatagaacaaagtcccttccctcatggagcttacattctggtgaggaagatagattacaaacacatacacataaaaaactggttatgtgaaaaaatctgtatatcagggtataggactgaggatacaacagcaaggagattcagctttagatggggtgggtcagagaagaatgcactgaggaagtaacaatgtagcagaggaggtgactacacagtagagacctagataataaagttattactcataatctgtaatgctaattagactgcgacttaatgaatcagtaaagaagtatgcaaaataggctgggtgccatggctcatgcctataatcccaacactttgggaggccaaggggggtggattgcttgagctcagcagttcaagaccagcctgggcaacatggcaaaaccccgcctctacaaaaattacaaaaaaattagctggtatggtggcgtgtacctgtagtcccagcttctctggaggctgaggcaggaggatcacttgagcctggaaggtggaggttgcagtgagctgagatcgtaccactgaactccagcctaggtgacagagtgaggccctgtctcaaaaaaaaaaaaaaagaaaagaagtatgtgaaataataagaaatgcagtcatgtgctgcataatgatgtttcagtcaataatgaatggctatccagtggtggtcccataagataatagtctgtttttactgtaccttttctatgtttagctatgtttaggtacacaaatacttaccatgtgttacagttgcctacagtattcagtacagtaacatgctacacatttaggtttgtgtaagtatactccatgatgtttgtacaacaatgaaatcacctaacaaagcatttctcagaacttatccccattgccagttgacacatgactacatatattagtctctgctcctactctctggcacagaactcttacaacccttgtaatttcctgaatgataggggtgctaggagaatcatttgtcatatcatttgatcgctgccctgattcctgagacagagttcctaatacccttgtagataggagtactaggagtatcttttgttgtaatatttggtctttgaccccagttcctgacacagaactcctaagacctttgtaatttcctgagtggtaggagcatctgatacagagctcctaaatccctcaggatttcctgggtaattaggagtgacttttgtacaaatgaggtgacccttggtggactcctggatgggggctagtcaccagaaagataaagtcacgattgtaagcttgaagctttcagctctaccctctatccattggagatgggagaagggctggaaattgagttaataattaatcatacctctgtgatgaagcctccataaaaatccctgaactgtaaggtttggagagtttccaggttggtgtagacacccatgtgtcaggagggtggcacaccccaactctggggacagaagcttctgagcttggagcccttccataccttgccctatgtatttcttcatctggctgttgatcttgttcatctatgtcctttgttatatcctttaaaaattaactgataaacataagtaaagtgcttcccttttgctagagttctgtgagccactctagcaaattaatcgaacctgagtagggagtttgaggaaccccaatttatagctggttggtcagaagcagaggttacaacctggtgcttgcaactggcatgtgaagtgggggacagtattatggctctgagcccttaaccagtgggatctgatgcgatctcctggtagggtcagaatttattttttgctagtagggagaaatccccacacattttggtgaccagaggcagtgttttgtgttaaatggtgtacaagagttggaaaaacactttggttttttttcccattcttaataaagtgataccatcagaaagagaaccctagaagcagaatgtagacaaaactagaagtggaggtgatcctgaagagagagaggcagtaagttctcagaagttaccaccaaatccaggtgaaaaagaacaagggcggaagatagtggcagaagggaagggaaagaaatgataagcatgaataatattttaaaagtagatttggtgactgaggtttggtcacctcagtcagaggcaaggtactaatcaaggtagattgctgggatcacagtttgattgattgagtagataatgggtagagatttcccatccattctctgttttaccagcagaacccttttcccaagtaaaatcttacatggaatccaatatatcagttagacaaaatgaggctaatgtgggtggagcttcctgaggttattagcaatacttctaatgggaagtaggacaagaggcgttatatgcacataccctgaagagctctttttttaagatttaactgtttccagcttcccttgtccttgcgctcagatgtacagttggcaggggaaatttttgttacttttcccccttaataaaagagtaataaatgctcattaaaaaatacaaagaaaaatgagaaaaatacaaaatctagttcaaatacacaagattaaaacaatatattttcttttattattttttatgtgcagcttaaaaataaggttataatcatatttatttctaatattttgaagttttgattaaaaatttttaaaattttttgtgggtacataatagatgtgtatacatatatatttatggagtacttgagttactttgatatagtcatactttatcaaatgtgtaataatcacatcatggtaaatggagtatccatcccctcaagcatttgtcctttgtggttacaaacaatccagttacactgttttagttatttataaatgtataattattgaccggctgggtgcaatggcacatgcctgtaaccccagcactttgggaggcaggcggatcacttgaggtcaggagtctgagaccagcctggccaacatggtgaaaccctgtctctactaaaaatataaaaattagccgagtgtggtggcactcgcttgtaatcccagctacttgggaggctgaggtgggagacttgcttgaatctgagaggtagaggttgcattgagctgagatcacaccactgcactccggcctgggcgacagagcgagtctctgtctcaaaaaaaataaaaataaaaaaatctaatatcaaatattatttattctttctgtttttttttgtactcgttaatcaccctcactccccctgccatccctgccacgccactatgtttcccagcctctgataaccatagtttattttctgtctccacgtgttcaattgttttagtttttagcacccacaaataagtaagaacatgtgaagtttatctttccatgccttgcttatttcacttaacataatgacctctggttccttccatattgtgaatgacaggatctcattttttttaatggccgaatagtactccactgtgtacatgtaccacattttctttatccatttgtatgttgatggacacttagattgcttctaaatcttggctattgtgaatagtgctgcaacaaacatggaaatacagatgtctcttcaatatactgatttcctttcttttgggtgtatacctagtagtgggattgctggatcatgtggtagctcaatttttagttttttgaggagctcccaaactgttctccatagtgtactaacttatattcctgccaacagcgtacaagggttcccttctctccacatcctcaccaacatttgttattccctgtctcttggttaaaagccattttagctggggtgagatgatatctcattgtagttttaatttgcatttctctgataatcagtgattttgagcactttttatatacctgtttgccatttatatgtcttattttgagaaatgtctattcagatcttttgcccattttttaattgaattgttagctcttttatattctggttataaaactcttgtcaggtgggtagtttgcggatgttttctcccattctgtgggttgtctctcactttgttgattgtttcctttgctatgcaggaacgttttacttggtatgttcgcatttgtccatttttgctttggttgcctgtgcttgtggggtcctgctcaagaaattcttgcccagaccaatgtcctggagattttccccaaggttttcttgtagtagtttcatagattgaggtcttagatttaaatctttagtccactttgatttgatttttgtatatggtgagagataggggtctagtttcattcttttgcatacggatatccagttttcccagcactgtttattgaagaaactgtctgttctccagtgtatgttgttggcacctttgtggaaaatgagttcactctaggtgtatggatttatttctgggttctctattctgttccattggtctatgtgtctgtttttttgccagtatcatgccattttgtttactatagctctgtagtgtaatttgaagtcaggtaatgtgattccttcagttttgttctttttgctcaggatagctttggctattctgggtctattgtggctctatataaattttaggattgttttttctatttctgtgaagaatgtcattggtattttgataggattgcattgaatctaaagattgccttgggtactgtggacattttaacaatactgattcttctagtctatgaatatggaatacctttccattttttgtgtcctctttaatttctttcatcagtattttatagtttttattgtagggatctttcatttctttgactaattcctaggtatttaatttcatttgtatctactataaatgggattacttttaattactttttcagattgttcactgttgccattagaaagctactgatttttgtatgttgatttgtgtcctgcaactttactgaatttgcttagcaattctaatagtttttttgtggaatctagatttttcaaaatgtaatatattatctgcaaacagggataatttgacttcttcctttctaatttgaatggccctttatttttatctcttgtctgaatgttgtagctaggacttccagtactatactgaataacagtgttgaaagtaggcttccttgttgtgttccagatcttataggaaaggctttcactttttcctatcctgtattttactagctgtgggtctgtcatgtatgccttttattatgttgaggtacgttccttctgtacccagttttttagggattgtatcatgaagcgatgttgaattttatcaaatgctttttcagcatcagttgaaatgattatattgtttttgtctttcatttcattgaaatgatatattacattgattgacttgcattcattgagccattttgcatctctgggatacatcccacttggtcatgatcaatgatctttttaatgtgttgttgaatacggtttagtagtattttgttgagggtttttgcatcagtgtacatcagggatatttgcctgtagttttctttttttgatgtttctttgtctggttttggcatctgggtgatacaagccttgtagaatgaatttggaagtattcatctctcctccatttcaatggtccccaacctttttggccccagggattggttttgtggaatacaatttttccatggactggggtgaggggtggtatggtttacagaatgattcaagtgtattacatttgttgtgcaccttatttctaatattattacattgtgatatataatgaagtaattatacaactcaccataatgtagaatcagtgggagccctgagcttgttttcctgcaactaggtggtcccatcttggggtgacgggagtcagtgacagatcatcatcaggcatgagattctcacaaggagcacacaacttagatccctcacatgcacagttcacaacagggtttgcactcctgtgagactctaatgtcgtggctaatctgacagaggtggaggtcaggtggtaatgcaagcagtggggagcatctgtaaatacagatgaagctgctttcactcgcccgccactcacctcctgcagtgcatcctggtttctaacaggccacggaccagtaccagtctgtggcccaggggtttgggacccctgctgtactttttggaatagtttgagtaagatggatatcagttcttctttaaatatttggtaagatttagcagtgaagttgtcaggtgctgggcttttctttactgaaagcctttttattactgcttcaatcttgttacttgttattggtctgttcaggttttggattactttatggttcagtgttggtaggttgtatgtgtctgggaatttatccatttcttctaggttttccaatttattggcatatagtagccatgttgctcctagtagccactaatgaatttccgtggtatcaattttaatgtctccttttttgtctctgattttatttatttgggtcttctctctttttttcttagtctgactaaaggtttgtcaatattatcttttcagaaaaccaactttttgtttcattgatcttttgcattgtttcctgtgtttcaatttgttttatttctgctctgatccttattctttcttttcttctacaaattttagatttggtttgctcttgcttttctagctctttaagatgcatcattaggttatctatttgaagttttttcacttttttgatgtataagcacttataccatcaacttccctcttagtgcttctttcactatatcccataggttttggtgtgttgtgtttcttttatcatttgtttcaagtacattttaaatttctttctaatttcttttttgaccctctggtcaactggtagcatattgttcagtttccatatctttgtacagtttctagaattcctcttgttattgatgtctagttttattctattgtggtcagagaagatgcttcataatatttcaattttttgaatgttttaagactgttttgttacctaacatttggtctgctcttgagaatgatccatgtgctgaagaaaagaatgtgtattgtgcagccattggatgaaatgttttgtaaatatcttattaggtccaattggtctatagcgaaaattaagtctagtgtttccttgtggattttctgtttggaagatctgttcattgctcaaagtgggatattgaagtctccagctattattgtattgggggtttatctgtctgtttagcagtaatatttgctttatatatctgtgtgctccagtgttgggtacatatatatttacaattgttatatcctcttgctgaattgacccctttatgtaatgaccttctttgtctctttatagttttgtcttgaagtctgttttatctgatacaagtatagctacatctgctcttttttggtttccattgtcatggaatatctttttgcatctcttcatatatctgcatgtgtctttattggtgaagtatgtttcttgtgggcaacaagtcattggatcttgttttttatccattcagccactctatgtcttttgattggagagttgagtccgttttcattcgatgttattgttgataagtcggacttactcccgccattttattgtattctggttgttttgtgatgttctcttcattccttcttcccttccttcctgcgttccttttagttaaggtgatttttctctggtggtatgatttaatttcttgctttttattttttgagtatccattgtatgttgtttgatttgaggttactatgaggcttgcaaataatataacccattattttttaaacagatgataactggctggatgtggtggctcattcctgtgatcccagcactttgggaggctgaggcgggcagatcacttgagttcaagagttcgcgaccagcctggccaacatggcaaaaaccccatctctactaaaaatacaagaattagccaggcatggtagcgtgcatctgtaatcccagctacttgggaggttgaggcatgagaatcacttgaacctgggaggcggaggttgcagtgagccgagatcgtgccactgcactccagcctgggtgacagagcaagactccatgtcaaaaaaattaaaaataagtgagttttgtaccttcagatgatttcttattgctcattaacatccttttcttttagattgaaggaatttctttagaatttcttgtagaacaggtctggtgttgatgaaatctctttgcttttgttgtctgggaaagtctttatttctccttcatgtttgaaggatatttttgctggatatactattctggggcaaaaggttttttccttcagcactttaaatatgtcacgccactctcttcctggactgtaaagtttccactgaaaagtctgctgccgggtgctttggagcttcattgcatgttatttgtttcttttctcttggggctttttggattctttctttatctttgaccttcaggagtttgattattaaatcccttgaggtagtctttgggttaagtcagcttggtgttctataaacttcttgtacttgaatgttgatatctctctctaggtttgggaattttgctgatattatctctttgaataaactttttaccttatgtgtttctctgcctccaccttaagttattaaggccaacaacttttagatttgcttttttggaggctattttctagatcttgtaggtgtgcttcattcttttttattcttttttcttttgtctcctctgattgtgtgttttttgttttttgtttttgagatggagtctcgccctgtcacctaggctggagtgcaatggcgcaatctcagctcactgaaacctctgcctcccgggttcaagccattctactgcctcagccttctgagtagctgggattacaggtgcccgccagcacacccagctaatttttgtatttttagtagagatggggcttcaccaggttggccaggctgggactgtgtattttcaaatagcctgtcttcaagctcactgattctttcttctgcttgatcaattctgccgttagaagactcatacatttttcagcatgtcagttgcatttttcaactctagaatttctgtttgatcctttttagttatttcaatctttctgttaaatttatctgatagaattctgaattccttctccgtgttatcttgaatttctttgagttacttcaaaacagcaattttgaattctctgtctgaaaggtcacatacctcttttcctctgggattggttactggtgtcttacttagttcatttgttgaggtattgttttcctggatggtcttggtgcttgtggatgttcatcgatgtctgaacattgacgagttatatatttattgtagtctttggtgtctgggcttgtttgtacctgtgcttcttgggaaggctttctaggtattctaagggacttgggtgttgtgattcaagtttttagtcatggcagctgtatctgcattagggggtaccttaaacccagtaatgctgtggttcttgcagacttgtagaggtgccaccttggtagtcttggataagaactgggagaattttctggtttaccaggcagaaactctgattatctttcctttctttttcccaaacagagtgtctctgtctgtgctgagctgcctggagataggggaggggttacataagtatccctgtggccaccaccactgggactgcactggttcagacctgaagccagcacaatactgggtcttgctcaaggccctggggctttacaatcagcaggtgatgaagccagctgggtttgtgttcttcccttcagggcagcgagttctcctgggccccatgcgggttgagagacgccatctgggaggcagggcctagagtcggaaaccttagaaatctacctgggtctgtattctgctatggttgagctggcacccagaccacaagacaaagtccttctcactcttctctcccctttccacaggcagaggagtctttcccccagccaccaccacaggtccatagagagtactgagaggccacttccagggtttacttaaggctcaagggctcttcagtcagcttgtggtgaatgctgccaggcctgggactcacccttaaggttgatgggctcctctctcatccagagtaggtccagaaatgctgttgaagagcccaggcttggaatcagggaccccaagagcccacttggtgctctacctcagctggtggctcagctggtacctaaactgtgagacaaagtctcctttatttctccctctgcttttctcaaacagaaggagtttctcatatgacccagcttggaatgttctgggtcatacgtgaagccagcatgtctcagagtctcacccaaggcccatgaagtgtattgcctgtctactgctactgattattcagggcccaagagctctttagtcagcaggtgaggaatcctgccaggactgggtccttcccttcaaggcagtaggttcccttctggaccatggtgtgtctagaagtgtcttctgggagctagggcttagaatgggctcatgattctgccaggtgccctattctactgtggctgagctggtatcctaattgcaatacaaagtcctcttaacttccttctccactcctcaagcagaaagaaggagtgtctttttcaggttggagctgtgcagcctgatgttgggatggggtggcgcaagcactcccttagccacccctgttgatgtctcactaggttgtgtgcccccgatgtccactggctctgagcccagcacagcactaggacttgctgaagagttgtagtctttttggcctagactgccttttaagtttgtttaggaccccagagctctgcctgtggtggcagagattgccagaactcaagttctgaccactgggatggacgattccttctgtctagagctgttctatatgttccctctgtgggtatcagctgagttctgcccagtgttgacagcactgagttccaatacagagtcccacagtcactgagctctccctcccccaggtgcatagattctctctttctgccacatggctgctgccaggggatagggaaggggtggagttggtagttcaagactctctttcctaccctctttggtgcctctttcagcaatatgaagttaaaaccaggtattatgatcgctcctgatgtttggttcttatgaacgtacttttttgtgtagatagttgttaaatttggtgttcctgtaaatggagggaccatgggtagaggcttctatttggccatcttgcttcattccccagctaatattttcaagtttgagaaacattttgtgacaactgaagaaactgcacacagaactacatgttaagtcataatcttagaatgttgattgaggaacatattgttaagctaatattacttcattaacacttaaaaattaatttgtgttttactagtcacaacctcatctatatatatagggaagatcgtttgcaataaatctaagattaaagattgaaaccactatcacattatttctatgtttcattttttttcatcttgccttaaacttgaaacatttcttccattttatttatagctgcatcaaaatattttaatagtcatatgctgttccattaagtggatatattacaatttacctatccattcccccattgtccaacacttagattgtctctatcttatttctgataaatggtaccacagcaaatatctttctgaattactttctggttctgcttctggtatgggtatttagcttctattggaccaaacctattgcaaataacaactagaaattctggataaaacttttttcttttttctttttttttttttttgagacggagtctcactctgttgcccaggatggagtgcagtggtgtgatctcagctcactgcaacctctgcctcctgggttcaagtgattctcttgcctcagcctcccaagtagctgggattacaggtatgcaccaccatgcccagctaatttttggtattttagtaaagacagggtttcaccatgttggccaggctggtctcaaactcctgacctcaggtgatccgcccgcctcagcctcctgaagtgctgggactacaggcgtgagccaccatgccgggaaagccttttttttttttttttttgaggcaggttctggctctgttgcccaggctggagtgcagtgacatgatcacatctcattgcaaccttgacctcctgggctcaagcaatcctttcatttcagcctcctgactagctgggactacagatatgcaccaccacactggctatttttttttttttttttttttttttctgtagagacagggctttgccacattgcccaggcttgtcttgaactcctggtctcaagagatcctcctgccttggcctcccaaagtattgggattacagtcatgagacaccatgtgtggcctggatacaatatatttttttaaaagtatctcaaagcagtagagagggactaacagagttgtacttgtttagccaggtgagtttaccattttttagtttttagtttcagtcagaggacaggcactagtgtgctctacgcaggatactaaactttcgcagaaaaaacaaaatcttattggctggaagaatttgatggcagagattgaggcaaacatgatggctcaaaaggggagaaattaggttgttttgtttttttgttgttgagtttgaggagttctttatatattctggatattaacctcttttcagatatatcatttgcagatattttcttccattcaataggttgtgttatcacttctttatagtatactttgatacacagaagtccttaattttgatggattacagttaattcattttctcttttgttgcctgtgcttttcgtatctgtcatattcatgaaatcattgccaaatctgatgtcatgaagatccttctaagagttttatagttttagctcttaagtttaggcctttggtccattatgagttgatttttttaatggtgtaacgtgagaatccaacattattttgcatgtggatatctagtttttctagtagcattagttgaaaagactgtcctttcctcattaaatggtcttggcacccttgtcgaaaatcagtggattgtatttgtgatactttatttttgactttttaaattcattcattcattaattgttattttattttatttttttgagacaaagtctcactctgtcgcccacgctggaatgcagtagcacaatctcggctcactgcaacctctgcctcccgggttcaagtgattctcatgcctcagcctcccgagtagccgggattgcaggcacccgccaccatgcctggctaatttttgtatttttagtagagtccaggtttcaccatgttgttcaggctggtctcaatctcctggcctcaggtgatccacctgcctcggcctcccaaggtgctgggattacaggtgtgagccaccatacctggcctgtttttttaatttatatatttagagatggggtcttgctctattgcccaggttggtctcgcacttccagcctcaagcaattctcccgccttggtctcccaaagtgttgggattgcaggtgtgagccactgcacccagcatatttctgagttctttttttttgagatagaatctcactctgttgcccaggctggagtgcagtggtataatctcaactcacttcaacctccacttcctgggttcaagtgattctcctgcctcagcctcctgagtagatgggtttacaggtgtgtgccaccatgcctggctagtttttgtattttcagtagagacagggttttaccatgttggccagtctggtctcgaactcctgacctcaggtgatccacccgccctcggcctcccaaagtgctgggattacaggcgtgagccactgcacctggcctatttctgatttcttgattttattccatcagcctgtgtctgtccatatgtctgtatcataatgtttttattactgtagttttggtaagtttcaaaattgggaagtgtgagttttccaactttattcttcgtcatgattgttttgctatttagggctcttggaattccatgtgagtttggggatcagcttttctatttctctgaaaaaagacacttaacattttgatggagattgcattgaatctctagattgctttggttttattgatcttaatgctccattcaaatggaacatttatctagtctttaattcaccatttcatttgcagtgatgataatgttctggaattaaatagaggtgatggttttatgattttgtaaatatactaaaacctactttcaaaagtgaattgtttgcaagtgaattataccttgatttaacaagacaaaagcaaaaacactttcttcaacttgacgtctacttccagctgtgatttgttcttcctcttataatcagactttttggaagagggcatacgctttcagtgccattgtcacctctcattcactcctctgtccaatataatctggcttttgtttccattaattatatgaaactgcccttagtctttgtcttttttattttttttttttgcggggggggggggggggttgtttgtttgtttttaagcatttaacacagttgatatctttcttttgtttttcttaataaccttttcattttagaacagctttaggcttacagaaaaattttgaagatagtacagagttactttatacccttcactcagtttctcctactatcagtagcgtacaaaactcagattgggcaatatggtgagaccctgcctctacaaaaacatttttaaaaattaactgggcatggtggcacatacctgtactcctagctactcaggaggctgaggcgggaggatcacttgagcccaggagtttgaggccacaggagctgtgattttgccactgcactccagcctgggtgacattttcatcacagcatattaaggcacatactatcaacatgacttatcactgttgatgtgaaccttgatcagctggccgatgtcgcttttgtcaggtttctccacagtaaagttagtctttacccctctccttttctgcatcataggctttggaaggaagtcattgtgtggattgcacacttgaggagcagggagttatgctctccctccttgaggggagtttctacataagttaaattaacatttacaccaattagaactctttggtgctctagatttgtcccttctcctctattgattcaatcatttatttagattagtatggactcatggatatttagtttatactctgggttataatccaatactacttttattttcttgctcacatttccagatatggccattggaagctctttcagttggtttccgtgtcccttggacacatcctagtcattgtgtttgtttttgatacttccttacttgttggcactgcaagatcccccagactcatcttgtgtatttcctgcccggtcctcagatcagtcatttttccagagtatggattccttgtcttggagaatgttattagaaaccagtatctcagtgctaaatgagctcattgctactggagtggtgcctttctttttgaatcactgttttatcctttgtgtctgtgatactacattttcttagtctttcatagaaggtagtatagtgtagtagttaagaacaagagctctggaggactaaaatgtaatcttggttccatttcttacacccagccaaatgtgtgatcttgagcaagttgatctttctaaactacagtgtccacatctgtaatgatacatattataatagtaggttgctcatagaatgtgtaaagattaaatgagcaactgcacatagtaagttatgcgtagcacatagtaagcattcattctgtgcttgcttttttctcttgtttataatattttcaccttcctttttggctgttccctgacagtctactctattagatttcctttgtcttctaaatgctatagtgttccatggtcttaggttttcttctcaccttgtgtattctccccaggtgatttcacctattcttatagctttagttgtcatctgttatgtatatgtatgattccgaaatctatacctgtggcccaaatacttgtcttaagattttgtatatccgacagcctattgggtaccttcatttgaataactttaatgcacctcagactcagtctgtccagaattaaagtaattattttaccctcccaaaatctgctgtcccccttcacctgccctttatcccagccagaaacagaggtgtcatctttaattcctttctctttctgtctactcccagtcaaatcacttacaaggctttttgattccacctaactctctgagccttcctcacccattttctctgccttcactgctgctgtaataggtcagactactataaaccatttcctggattactgcagctgattttctgtttcattctctgtactgtagctgcatactttttctcaaacacagatctgcacaaatcttttcatgttgtaaaacattttaatagttccttattgccctcaagataaagtccaaactacaatttaaatgatcctttatggccgggtgcggtggctcacgcgtgtattccttgcactttgagagaccaatgcagttggatcagttgaggtcaggagttcgagaccagcctggccaacatggtgaaaccccatctctactaaaaatataaataatcagcccggtgcggtggtgtgcgcctgtaatcccagctactaggggggctgaggcaggagaatcgcttgaacccaggaggcagagcttgcagtaagccaagattcagccactgcacttcagcctgggtgacagagcaagactccatctcaaaaaaaaaaaaactcctttaagataatggttcttgttttcatctgtactcttatcccagacacctatccttctgccacactgaactgcttttagttccctgttctcttttctctgtcttatttagcctttctatatgctcctctctgggtctggaattttatgcttccttgacaccatctttcatgccactcctgctatatttatacatatcacctagctaattcctgttcatcccttgcatctaagcttaggtcttatttccactggcctgtaagcctctcaaataaaaatatttaaaactcctaaatggaaagaagattaaaaataatggaaatggccaatgatgtaccaggagcaagaatataatattgatactaaataaaataaaacatacttcaaacctcaaggcattaaagggacaaagaggaatattatataatgataaataatcaaaacaacagtccaattttcaaaaaatggacaaaacttatgaaaagaaagttcacagaaatggaaatattaacagttcttacacatatgtaacggtactcaacctcattcataaggcatatgtactttaaaattacactgagggctgggcatagtggctcatgcctgtagtcccagcacttaatgaagccaaggctggagaactgtttgagcccaaagttcaagaccagcttgggcagcacagggaggcattgcctctacaaaagataaaaataaaattagccaggcttggtggcatgcatctgtagtcccagctgtttgggaggctgaggcaggaggattgcttgagcccaggggtttaggctgcagtgagccagctgtgttcgtgccattgtacttgtactccagcctgggtgaccctgtctcaaaaaaataaaaacactgatgtatcgtatttcactctataagattggtgagtattaagaagtttgtgcaggattgaaaaaaagaagtttgggccaggtgcggtggctcacgcctataatcccagcactttgggaggccgagatgggcagattacttgaggccaggagtttgagaccagcctggccaacatggcgaaaccctgtctctactaaaaatacaaaaaattagctgggcatggtggcacatgcctgtagtcccagctactcaggaggctgaggcaggagaatagcttaaatttgggaaacggaggttgcagtgagccgagatcacgccactgcactgcagcctgggcaacagagcaagactccatctcaaaaaaaagaaaaaaggccaggcgtggtggctcaagcctgtaatcccagaactttgagaggctgaggtgggcggatcacctgaggtaaggagttcaagacaagcctggccaacatggtgaaaccccgtctctactaaaaatacaaaaaattagccaggcatggtggtggatgcctgtaatcccagctactcaggaggctgaggcaggagaatcacttgaacctgggaggcagaggttgcagtgagttgagatagcaccattgcacttccagcctgggcaacaagagcgaaactccgtctcaaaaaaaaaaaaaggaaaggaaaaatgtttgacaaaaacactcttgtcaagggtgtaaggtaacatgctttcctatactactggtgggaacataaattagtacagcctttatgagagggaatttgcaatatttattaatttaacattaacatatcttatgacttagcagtctcaattctaggaatttattttattgctaagctcacaaatttaggaaataaaagttaatctttacagtataatatgtaatagtaaagtattggaaacaatgtaaatccatcactaggatgtagttaaataaattgtgttcagtacatataatggaatgctatgcagatgtaaaattgggaatgagaaaggctatgtacaaatatagaatgatctagaagacacattgaattaacaaaagaaaccgcgcgcggtgtctcactcctgtaatcccagcactttcggaggtcaagtcgggtggatcacgaggtcaggagttcgagaccagcctggccaacatgatgaaacctcgtctctactaaaaatacaaaaattagccaggcatggtggtgtgcgcctgtaatcccagctactcaggagactgaggcaggagaatcagttgaaccaaggagacggaggttgcattgagccgacattgcgccactgcactttagcctgggtgacagagcaagactctgtctcaaacaagaaaaaggaaagaaaagtgcaaaacagtgatctgggtatataactattagtttaaagaagtgaggaacaggcctggcgtggtggctcacactgataatcctagcacttttgtaggctgaggcgggcagatccattgagtccaggaatttgagaccagcctgggcaacatggtgaaaccctgtctctacgaaaaattagctgggggtggtggtgtgtacctgtagtcccagctactcaggaggctgaggtgggaggattgcttgagcccaggaggcaagggttgcaatgagctgagattgtgccactgcactccagccagccagggtgacagagtgagaccctttctaaaaaaaaaaaaaagtgagaaataatgacacaacatacaaacttgaaaacatataatgtttcttgtaaggatacacagaaactgttgacattggttatctggtagtggaaaaacagtgtctttcacagaggagaaatttttaattttaatgaagttcaacatgaatttttctttcatggatcatgcttttgctgttgtatctaaaatgtaattgccaaaaccaaggtcacatagattttcttttttattgtcttctaggagttttatagttttgtattttatgttttaagtctagaatccattttggatttttatgacaggtataaagaatctgtgtctagattcatttctttacatgtagatatccagttcatttggcctcatttattgaaaagactctcttttctccattaaattgcctttgcccatttgtgagagattagttgaccatatttttattgttctgtttcagggctgtctgtcctgttttgttgatctattttgccgttcttttgccagtgccacactatcttgattattgtggctttatagttacagtcttttttttttttttttttaagctagagtcttactctgtcactcaagatggagtgcagtggcacaattacagcttgctgctgccttgacctcctgggctcaggtaatctcctcacctcagcttcccaagtacctggaactataggcacgtgccaccatggccagctaatttttaaatttgtttgtagagacagggtctcactttgttgcctaggctggtcttgaactcctaggctcaagctatcttcctgccttggtctgagtcagtgctgagattacaggcatgagctaccatgcccgacctacagtcagtcttaaagttggataatgttagtcctccagcttttctttactattgtgttggctcttctgagtcttttaccttgtcatataaattttagaatcagttttttgataactacaaagtaacttgcaggatttttattgagattgcaatgaatctgtacatcaagttgagaataactgaaatcttaataatattgattcttcctattcatgagcatggaatagctctacattaattaggtcttctttgatttcttttatcagagttttatggttttcccccagagatcttatatatatatatatatttattggatttatacctaagtatttcatttttggtgctaatgtaaatggtcttgtgtttttaatttcaaatattaattgtttattgctggcatataagaaggcaattaattgtatgttaaacttcatattctgtaaccttgctgtcattgcttatcagttgcaggagagtttttgattataagaggtattttaattttcagtttctagttcttctttgctaacatatagatatataattgctttctaatttcactggttaggactttcagcacaaggtttgataaaaatggtggcagcagaaatccttgccttgttccccatattaggaggaaagtgttaagtcttttatttttaggtattattttagctgtagattttttttatagctgccctttatcaggttgagtaagttttccttctgttcttggttttctgggaattttatacatgaatggtttttggattttgttaaatgttttttctgcccctgttgcaatgattacatggtggagtactgttaatatggtatattattacattgattgatttttatatgtcaaatcagccttggatttcctggataaacctcagttatgagagaagtacacaaattctccatttggagagtattggtgattagatcctgttttgtattatttttagtcctttatagtcttagagatgagtctggggtcccctgggtcacagcaaggaaccagctgaagttagagtccccagaagatagatgatccccaacttaacgatggtttgacttaaaaatttttgactttatgatggtgcgaaagtgacacacattcagtagaaaccatactttcgagtacccataccactgttatgtttttcactttcagtacagtattcaataaattacatgagttattcaacactttattataaaataggctttgtggtagatgactttgcctaattgtaggctaatgtaagtattctgagcaccttaaggtaggctgagctaacctataatgtttgataggttaggtgcattaaatgaatttccaacttacaatattttcatcttacaatgggtttatcaggatgtaaccgcatcatacttaccttcatagcatctatacatacatttatagtggcaccaattgtttcaggttttataacatttttgaacaaatcttcacagcctggaaacaggaataaaagaagcatattgtgggcaaagcattaggagcaaaaggaattcagagttctactgagagagttgctggaatggctccctgtagggaccataataatgcatttctggtgagatgcaaatgtgagaactgtgcttttcttgatgagagtaagataaagtttaaagggagttggaaagggaaaagagtagagaattggtattagaaattacttcagtgtttaaaatcttaaaaattcagtagcttatatgttttagagtttcatgtttacttaagctgctaacttttacctgcattacttttttggattttacttcacaaatttaagccccaaaatatctagtaagcctgttttattttgtattattttgagtaataggtataagcaatatttggttgctatttcaataaaaattctttggcaggtgtccaaatcccagcgctttgagaggccgaggcaggcagatcacttgaggtcaggagtttgagaccagcctggccaacatggcgaaacctcctctttactaaaaaatacaaaaattagccaggtatgggggtgtgcacctatagtcccagctactcaggaggctgaggtgggagcatcacttgaacctgggaggcagaggttgcagtgagccgagattgcgccaccctgctccagcctaggcgacagcgtgagactctgtctcaaacacacacacacacacacccacacacacacacacacagagtgaatggttctagctttcctctttttttggtttaggataactaaaattacacgcctgtaattccagcactttgggaggccgaggagggtagatcactggagctcaggactttgagaccagcctgggcaacacaaaaccccatttctacaaaaagtacaaaaattaaccaggcatggtggcctgtgcctgtgcagtcccagctccttgctccttgtgtggctgaactgggatgattgcttgagcctgggaggcagaggttgcagtgagctgagatcacaccattgcactctagcctgggtgaaagagtgagaccctgtctcaaaaaaaaaaaatcttaatgatctgaaaacagaattccattctgcaaataattttatttattgaccagttcatcccagcgagttgctttacctgaaaaacctttaccatctgatcctttttcttgtttgtatttttcctgtttatcttcagatacattttatttaaattaatagtggtttgttaccatattaaataattagatactacaattcaataagaactaccttttaaaaatgaaaatcagaggagttcctgatttaaaacaaaaaataaaggaaaatattaaagtgtttttaaagagactaaggttaccacatcttttatcttcctgttaactacttttgcaacatatattgttgtgattaggtagaattatacaactttgctctgtttctttgattgcgtattggaaactcttattatcccttttttcagtgacgttgttttacattggataacatccagtgacacttgtgtattctttacatcctttagtgagtccatttgggacccatttacatatgaaaagcagcatgactgacactgcagacatgtaaatcgcaaatctaaaggaattagagaagatgaaaacattatttatcaataaggtcctcagtctcccaaatgaacaaagtaggcacttgagtaataatttgaaaaagtgattcatcttttttctactccctgattaataaaggtgatattttcttagtatgcttggaggttgggaatactttaagtcagtagttctcgaattttatcaagcatgagagtcacctagagggcatgttataaagattaccaggcatcacctccagagttctgatacagtaggtctggggtgggacctgaaaattggtatcgctaacaagttctcaggagaagctgatgtttactagcactggaccatactttaagcactactgttggccaggcacggtcatctcagcatttgggaggccgaggtggacagatcgcttgagcccaggagttcgagaccagcctggccaacatggtaaaacccatgtctataaaaacacaaaaattacctggatgtggtggcacaggcctgtagtcccagctacttggatagctgaggcacaagaatcatttgaacccaggaggcaaaggttgcagtgacccaagattgcaccactgcactccagcctgggcgacagagtaagactctgtctcaaaacaagaaaaaaactaaaaaccaaaaaactactggtatatggtagggtatatgaaagtggagaatgagcaacaagtaggatcagcctgattttcctgcctaaggttttcattcaattcagaaattttttttttttaagtacctgctatgtgtctaatactacgatgtcatcaagctttacatgtcttagacttttcgacagtggatcttttgctttattgagaggcttcaccaactaaggagcactgtctaaaataaaagactagtaaagaaagaaataaagttattcattttgttgctttttcaaccctctgtttttatgctaggtaatattttaccctttaccaattttaatgtgcaaacattatttctggcaattccacctctaggtagctatcctaaggaaataactttcaacaattgattaatgtagacacagacagagatgtttatcatagatgtttattataaagagcagaaaagtagctcctacactgaagtctgtagttttgcaattactaaataaactgtgtatgtatgtatatgatagctaattttgtagccattaagttttgcttatgaagagaagcattttaaagttaaaaatgcttgatatacaagaattattttatgtaagcatattttaataaaatttaagagctcagatttaagtgaaattgtattttaggttcttaactatgtgagatttatttatagagaaaaatgaggaaatataacaaattactttttacaaagtatctttagaatgtgagattatgattgactgttactatatattctcttctgtatttgtaacatatccataactggatattacttttataattaaaatattcatgttttatatttacatattatttcaagttttatttacacacatatattagtgtacagctcagtgaagttttataagccagcactcatatctagaagcagaatataaccagcaccctagaagcatgccttgtgctctatttcaaggataactgctatcatgacttctaaaagcacagattattttctcctgtttttgtactttatataaatgtaatcatacagtatttattcttttgtgactggcttctcttgcttaagaagatgttgtgagatcaagcttagtaatcatagttcatcctttctcattgctatgtaatactccattgtgtgaataaaccattattcactttaatgttattgggcatttgggtaggtaattttaagtttgggaatattatgattagttatgtcataaatattttagtccatgtcctttggtgaacacatgtacgtatttctacagggcatacacctaggattggaactgtttggttggggttcagttttagtcgatactcccagatgatttttctcaaagtggttataccagttcacactcccactggcaacagatgaggatttctgttgctccacatccttgccaatacctaatgtgcattagtcagggttctccaaagaatcagaaccgctgtctctcctattggttttttatgactatatatatacacacacacacacacacacacatatatatatatattatataatatatatatatgtgtatatatacagctgacccttgaacaacgcagtggttggggcactgacctccctgtgcagtcaaaaatctgtgtataattttaactactaatagctcactgttggccaaaagccttaccgataacatgaacagttaagtaacccatattttgtatgttatagattgtgtactgtattcttacaataaagtaagccagagaaaggaaaatgttattaagaagatcttaagggagagaaaatatgtgtaccattcattaagtgtaagtggtttgtcataaaggtcttcatccttgtcatgttaatgaagagtaggctgagaaggagtaggaagaggaggggtggattttgccgtctcgggtggcagaggcagaagaaaatctgtgtataagtgtacctgtacagtttgaacctgttattcaaatatcagctctgtgtgtgtgtgtgtgtgtgtgtgtgtgtgtgtgtgtgtgtgtgtgtagagagagagagagagagaaattgattgattatagggattggctcatacagttatgtaggtcaagaaatcctgtgacctgctgtctgcaacctggagaaccaggaaagctggtgatgtcattcagtctgagtctgaaggctgagaatcacgggagccagtggcacaagtcccagctcaagtctgaagggctgagaactagaggggctgatggtacaagtcccaattctaggccagaggcctcagaaccagtgtgccaatttcacaggcaggaaaagatgaatgtccagctcaaacagaagcagattctcccttctgttgcctttttgttctctttgggccctcaacaggttggatgatgcccctctccattggagagggtgattttctttattcactctactgattcaaatgctagtctcttccagaaacatctcatagaccacccagaaacaatgttttatcagctatctgggcatcctttagctcagtcaagttgacacaaaagttaaccatcacagtatttttcatctgttttcttatacttagtgtggtaagtgtgcagtggtaatatatggtagctttaatttgtatttcctggatgattaatgaattgagagcctttcctatatttttggttgtaaattatgctaaaacgttgttgtagtttgcagctcagtatcagatatattttaactttatttcaaggaacttaattataagaagtattttacaaaatatatcaaaggatattataacttgatccaaggttatgtatgaaacttaaaaatagcatacatttaatttttaaagtctcaagtgttagtgtcctgtaatatggtacctaatgagatttagtttgagttgaattatacttttatgattgaatgttattttcctgttggcttcagctataaaaattaaagacgttctcatatgaaaaatcgttcagtagacggagttgaaattttttgccaaagacaaataagtaagttgataaccagtctctgtcggctgttgtcatcaggaacactgctagactcaagtaagataatatttgtaaagcactacccagatgtttgtgttacttttagagctttaaaatctttgaaatattcttaacatcttggttttctttctgttttatccactgataccttactcctaaccctccatgtgtagttctcagaatttattccattcttgctattgtcttgagtttttagaacaaggtagaaggcacagaacaacccaaaaactgcccccctccacacacacatttttatatatttaagtataatttaaataaataaatacagaatgctgctaacctcattggcattttaagatcatattgtaatggcaggctattgagacaacatgggacttgtacctagcatagtgcctgtctcacaggagctcactgtatatttgttgagtggataagacaatgaaaaaattctactgttgggtttttctctttttaggttttgttgggagcttccatttgttgtcccctacccaccagttttggatctttaattttaaaaagagtacttaagatggatatgagaaagttactgttatgctgggcacagtggctcacgcctataatcctaatgctttgggaggctgaagtggaaggatcacttgaggcaaggagttcaggaaagtttctgttagtaaaattttcaaagtggaactttctctcaagataacctcatatagacagtcagaaaggagaacagtaaaattgtaaaatgactggaaaataagtatacattttagtgattttttatgtggtacttattttgggagaatctaattattcaagtacccattaaaataaaaagcaaagttaatgttatctttatattatttaagatgtatccatgagataaattctataatatatattggattacttatgaacaaagagaactagaaaaaacgtgttttaagaggaggtaaataaaagaagttccaaatagaaggaaagaaagctggagaggggctggacacagctgctcaagcctgtaatcccagcactttgggaggccgaggcagtcagatcacctgagatcaggagtttgagaccagcctggccaacatggcaaaaccccgtctctactaaaaagacaaaaaaattagctgggcatggtggccgacgctggtagtcccagctactcaggaggctgaggcaggagaatcgctggaacctgggaggcagagattgcagtgagccgagattacaccattgcactccaccctgggtgacagagcaagactctgtctcaaaaaaaaagaaagaaagctggagagaacggtgacactatgtctcaatagcatctgttatcctagatgatgttaaaaagttctgttgaatgcttttttttcacaactctcttctactctgaattataaaatgtaatagtgtggtattagaaaagacagctaatcctttagaaattggtcgtatattattttgaccattggtcattgattattttactggccagtttgtgaagcttttcttgatttttttttattccagatctttagacctcactatgaaacaacccacttgttaggaaacattgatacagtcattggaaaatcttaaccatatgtggtagaatggccacaagcaaatgcatgaggcttaggcctgaagcttcagggctttgtttgatacatgtatcaatttatatagaattgatcaaagcatatctatgactgctactgattaccatagaaaaatagctgagtaactgttgctttattctgtaatatcaatgtgtataataaaaaataaattttgttcattgcctccagttctggcacacagttcctaaagccctttgaatctccaaagtaatgagtgtcttttgtactctaatgagaagattgttgactggggtcccctagatagctttaggatgggggctggtgccagaaagaccaaggattgaaactttcaaccccacctctgacttccagcagggagagagggcctggagatttagatgattaccaatggccatgatttaatcaatcatgcttacataaggaaacctctataaaaccccataaatgacagtttggagagcttctgggttggtggacacagtgaggtactgggagggtggcgtgcttggaggtggcatggaagctctgtgcacccaccccctacccctgccccattgccctgtcttacgtttctcttcgatttggctgttgccttcctgagttgtagtagccttttaaacaaaccagtaatagtaagtaaagtgctatactgagttctgtgtcattctagcaaattattaaatctgaggcggggtcatgggaaccctcaaatttgtagtctgtaggcagaaatgggagtagcctgggcatgtcatctgtggctagcagctgtggcaggcagtcttatgggactgacctcttagtctgtgaggtctgggctaactccaggtagttactatcaaaattgtattgaattgttagacacctaattggtgtctgaagaattggagaattggttggtgtgatttaaaaaaaaaaaaaaaaacccaaacatttggtgtcagaagtgttgtgagtaaaaacagttcattattaggtacttaaattcaaagatggtgtagattttatgtgtatgatcactggcttctctcttttaatatcgagggttagttatcaaggtaatttttaaatgacttggacatttaaaaaatagaataaaatactaatttataaataaacaagggttaaatcaggctgtataaatcagtggagatgtaagcactttaaggcaatatccttatctccgtttctgtgaaatttgagtgtggaatcttgtaagataattgtgactattttataggccataaggagaaaagtgacatctggtatatctggaccatagaccttaaaggattctaacacaaacacataccaagcttgattggtattgaactggcctggggaaaagtatgtcataatagcagaaactctgtgatggtatggatggagaactttataaagccaaggaactgaatccgggcaccgtggtcaaagaggaaaacttctagcgtctccctgtagccatacataattctataggtattaccattccctctcaactcattctgtattattagggaaataaagtctttctctaacgtttttcttttctcctaatatagtttgaaatgcagtcacttttacttaaacttatcttttggaataaaataatttatggaattcatagcactcagattgtttcaccagactacttgtagaaattctggattagttgattaaccacagttcatagcttcccagttgcacattatccttagatttcaaaaattcctttctgagtaagagatacaaaacaacccacccaggaacaaattattttcttggttggcagagcagtatcattcttagcacacatgaaatcgagctaagaaccagagctaatccaagattttagagttgtcttagctctgctaattttctttattattttgcttgtattttcattttcacacaactctctcaagtgattaagctgtacttaagtatttttttaaatttcgtctttaaaaaggttcttactgttttgtttcagaaaggacatgctatagctaatacactttttgtaatcttatggtggccatggaagtgtgccattcagacctcctgctggtgggaggcacaaatgactgacagtcccagctgtggtccctctggatccaccacctcattcttgctgaggtcacactgatggtgactccacatggccagtgaatgaatgagtgtaggcctgttcataagaaacacagttctcctctaatcagcagggcattacttcctattactgcataataattactctaaaatttaacagcttaaaacaaacattcatctcacatggtttctgaggatcagcaatctgggagtggcttacgtaggtatttctgcctcagggtccctcatgaggttgtagtcaagcaattggccagggctgtagtcatctgcaggctggactagggctggaagatgtccttccaggatggctcacatattcatacatggatattggcaagagcttacagttccttgctgactgctgttgacttcagatccttgtcacatggttgtctccacagggcagcaaataacatactttttcagggtccagatttgttggggacaagtaagagtagtttggtttttgtcttaggtatcatttattctgagatgctttttctaaacatcactcccaccaagggttgccagatatagcaagtagaggacaatatttggaacatacttctactaaaaaattattcattgttcatctaaaattcaaatttaactaggtatcttatattttatctgacagcctttctgggtttagtttgtcttctctgtgcacctgtggtaccctgtgctatcccgcttctatatttaccgcactatattttaattgtctatttagttgccagtatcttcccactagggtgaaacttctccatgggaataaactgtcttttttttttttttttaattcactgttatatccccagtgccaagcactgtgcttgacctataataggtactcagtagccaggcatggtggctcatgcctgtaatcccagcactttgggaggccaaggtgggcggatcatggggttaggagttcgagaccagcctgaccaacatggtgaaaccccatctctactaaaaatacaaaaattagccggatgtggtggcgcgtacctgtaatcccagctactcagaaggctgaggcaggagaattgcttgaacctgggaggcgaaggttgcagtgagccgagatcatgccactgcactccagcctgggcgacagagcgagactctgtctcaaaaaaaaaaaaaaaaaaaaaaaaaaaaggtacttaataaatgcatgtgggctttccaagaatgaaaacacttggtcttataattgcatgcacttttctcctccaccttttcttgattgtcatcatgaatctcagtagaatgctaatgcagcaaaagggctagtaattccaagattcaagaacttgtgttatcactttatatataagcttcaggttcccctctggtagctggagataatatctgtttcctcttggaagcaggaaaaaaaatgataaagcctactattttctaggattgtactagcttcaataattggaagctgggctttatgtaatgataataggttttaaggacatggaatcaaataggtctgagtttaaatgttagccttgtcacatactaaaggtgacttcttgggcaaatttgtcatgtttcaaaatgtcgattttcttatctctaaaatgggagtgatcatgcactttcataagggctattgtgaggattaaatgataaaacaagtgaccttgcctagcagagtgcctgtttttggcacatggtaggtacacagcaaatccctaatgaagcttcctggggctaccatatgtcccgtgagtgattctgtctttggattgataggcatttataattccaccaattgtagattctcatccaagtacatataccaaatatctgaacctatgttttatctcttactgagatggattactatggccacaacacaccagaagaataaaattaacctgttttatgataatctaaaatagctcatttctcttatatgtagatgaacaattcaatgcttgttgaatcccattcccagtgataggaggagactgactgcattgcaggatcaaaagtggatgtttttatgattgttgtctgccacaaactagttatctctgtgatgacttttccaatatccaatatctgcttaaaatctggatcagaaagctcatgaggttcttctttctcagtctttggctcttctgaaaatcaggttcaagtataacttttggcccttcacgtctctggaggtttctgtccttaatagtcttacatgcattagaattgttgattgtaccatctcttatgtccctaacactgtctttccccacttgatccatgctttttagtttcatgaataagaaaagtgaatctcataaaggtaaaatgacttactgcagaccacacactgggatttgaacctaggtatgttgactgggatttgaacctaggtatgttgacaaatcacaaatcagctgggatttgaacctaggtatgttgacttcattgcaatatgcatactacatgccagttgtttcagtggatgagaattatgaaacctgtgcattgatatacaaacacgaggtgttaatattatgaagtgccacctgagatacacggtaacccctatagcagagggtttatagttgatttaaggagaactgatacataaataacaaaacatagtgtcaatgattcatataggcaaaaccagctactaaagtcataattatttttagccatatagaatattttttgatattttattaatctcattttgtgtctggattcttgtacttagcataatgttttcaagattcattcatgttgtgtgaatcagtagttcttttctattactgaatagtattctattatatgatataccaccatttgtatatccagtcatgggttgatgaacatttttgttgtttcacttgtggagcattattaataaaactgctgtgaacattcaaatacaagcttatgtgttgacataagttttcatctctctaaggtaaatacctagaagtggaattgctgggtcatatggtaagtgtatatttaactttataagcaattaccaaacatgtttcccaaagtgtttgtacaagttggcattcccatcagcaatgtgtatgagagttctagtgccctgtgtccttgccagcacttggtatggtcagttttttttgttttctattttagtgattcaagtgagtttggtgctcagtgtggttttaatttgtatttccctaatgactaatgatattacgaatcttttcatgtgcttatttgccatcagcatattttctttggttacataagtgtttaaatcttttgcagattttttattgagttgtttgtcttgttattgtcttattcatgttacaagtcctttatcacatgtgtattttgcaaacattttctcccaggctgtcatgtgtctttttcttctcttaactttttaaaggcttttccaatatctcctgcttaaaatccagattagaaagctcatgaggttctactttctcagtcttaactttttaaagttaagagattttgaagagcagacatgttttatatcttgatacatcagtctgtttatgttgctataaaggactcatgaggcaggataatttataaagaaaagaagtttattttggctcatggttctgcaggctgtacaggaagcatggtgccagcatctacttccggtgagggccttgggaagtctacagtcatagcagaaggcaaaggagagtcagcaagtcacgtggcaagagagggagcaagagagatggagggaggtgccatactgttttaaacaaccagatctcatgtgaactactcattaccatagggatgacaccaagccattcatgagggatcctcccccatgacccagacacccccatcaggccccacctccaacattgaggattacatttcagcatgagatttggagcggacaaacatctaaactatatcacttaatgtgcagtttttcaattaaaaaagatagtttgtggttctttgtatcctatttaagaaatctgggctgggcgcggtggctcacgcctgtaatcccagcactttgggaggctgaggcaagtggatcacgaggccaggagatcgagaccatcctggctaacacggtgaaaccccatctctactaaaaatacaaaaaatagccgggcgtagtggcaggtgnnnnnnnnnnnnnnnnnnnnnnnnnnnnnnnnnnnnnnnnnnnnnnnnnnnnnnnnnnnnnnnnnnnnnnnnnnnnnnnnnnnnnnnnnnnnnnnnnnnnnnnnnnnnnnnnnnnnnnnnnnnnnnnnnnnnnnnnnnnnnnnnnnnnnnnnnnnnnnnnnnnnnnnnnnnnnnnnnnnnnnnnnnnnnnnnnnnnnnnnnnnnnnnnnnnnnnnnnnnnnnnnnnnnnnnnnnnnnnnnnnnnnnnnnnnnnnnnnnnnnnnnnnnnnnnnnnnnnnnnnnnnnnnnnnnnnnnnnnnnnnnnnnnnnnnnnagcatccccttgagcccaggattagagaccagcctcagcaacatagtggaaaccccatctcaggaaaaaaaagaggaaagaaaagaaatttttgcctaagccaataatactaaggttttctttttttttttctttgagacagagtctcgctcagtcgcccaggctgatctccgctcgatctccactcactgcaagctccgtctcctgggttcacgccattctcctgcctcagcctcctgagtagctgggactacaggcgcccaccaccacgcccggctaatttttttgtattttttttttttagtagaggcagggtttcaccgtgttagccaggatggtcatgatctcctgaccttgtgatctgcccgccttggcctcccaaagtgctgggattataggcgtgagccaccgcgcacggccaatactaaggttttctcgtacattttcctataagtttttacgttgctatattcctttattttcctagaactttcctagaagttttctaattttagctcttaaatttaagtctatggtaagttttgttttttgtgtttttccaagacagtcttgcttggccggagtgcagtagtgcagtcacagctcactgaagccttgacctcctgggctcaagctatcctcccacctcagcctcccgggtagctgggactacagacatgtgccaccacacccagctaatttttaaattttttgtagagatgaggtctccctatgttggctaggctggtctcgaactcttgggctcaagcaatcctcccgcttcagcttcccaaagtgctgggattacaaacatgagtcactaagtccagccttatgataaattttgagttaatttttatatatggaatgagaggaaaggtttatttttgtatcatatgaatatccaatcattccagcaacaaccagtcaaaaaagattataatttcccatagaattgctttgtacctttgtcaaatatcaattgactatgtaattgaggatctgtttctagattctgttctgttccattgatgtacgtgtcttatcttcatgccaatactgtactctcttggtagctcagtggttctcaatgaaggacaattttgcccctaggggacatttggcaatatctggagacggtttttttttttttgagatggaatctctctctgtctcccaggctgaagtgcagtggtgcaacctccgcctcccaggctcaagcaattctcccgcttcagcctcccgagtagctgggattacaggtgcacaccaccacgcccagccaatttttgtaattttagtagagatgaggtttcaccacattggccaggctggtctcaaacacctgatctcaagtaatccacccatcttggcctcccaaagtgctggattacaggcctgagccaccgcgccaggcctggagacatttttgattgtcacaacttggggggtaggcaggaaggttgcccctgggtagaggtagaggccagggatggtgctaaagattctgcaatgcacaggagagtcttccagaacaaaaaattagctggtccaaaatgtcagtagtgccaaggttgagaaactctgctgtagctgcatactaagccttaaaaccagatagtgtaatctttcgattttgttattttacaaagttgtttgagctatactaggtcctttgcattttatataaattttagaatcaaccttatacatttctacaaaaaatatctgctgagatttgattaggattacattgatctatagataaatttgggaagaattgacatattaacaatttttaatctcctgattgattgattttttgagatggagtctcactctgtcacccaggctggagtgcagtggagtgatttcagctcattgcaacctctgcctctcagattcaagcagttctcctgcctcaacctcccaagtagctgggagtatatatttattttatttttatttttttgagacagagtctcgctctgtctgtcacccaggctggagtgcagtggcgtgatcgtgactcactgcaagctctgcctcccaggttcataccattcccctgcctcagcctcccgagtagctgggactacaggcacgtgccaccacacccggctaatttttttgtgtttttagtagagacagggtttcaccgtgttagccaggatggtctcgatctcctgaccttgtgatccgcctgcctcggcctcctaaagtgctgggattacaggcgtgagccaccgtgtcccgccactgggagcatatagaaaggctagaagagaaaacagggaactaaaagcaattcagtgtcgcagaaggataggtgtctgggataagagtaaagatgaaaacaagaaccattatcataaaggatctttttttttttttatttttttttttttgagatgaagtcttgctctgtcacccaggctggagtgcagtggctggatcttggctcactgcaagctccgcctcctgggttcaagcgattctgcctcagcctcccgagtagctgggattacagacgcttgccaccacgcccagctaatttttgtatttttagtagagatggggttttaccatgttggccaggctcgaactcctgacctcggcctgtgatctgcccgcctcagccttccaaagtgctgggattacaggtgtgagccaccacacccagcctgaatcttctgatttataaacatgttttttctctccattaatttgtcttctatagtttcagcaatctattgcagtttccattgtataactcttgtacaattttgttagatttatccctaaatatttaatattttatgctattgtaaataatatgtttaaaatttttaatatctgattttgttttgttggcagaagatagaaatacagttggcttttgtatattgaccttgttgcctgtgaccttgccaaactcactcctagtccatttatatagattctataggattttccatatagaccaatattttgtttatgtacaaacaaattttacgtattcctttcttattttatacctttcatttcctttattacactggctaagccctctagttcattgtcaaaatagtaaaggtatacatcattgtcttgttcctgattttaggggaaaagcattcaatttttttaccataagtatgatttttagctatgggttttctatagttgctttttagcattttgagtaagttcccatctattccttgtctgctgagagtttttgtcatgaataattgttgaattttgttaaatgccttacctgcatctattgaagatgatagtgtagttcttcttttttattctgatgatatggggaattatattgattgattttccaatgttaaatcaaccttctgccattcatgggataaactcaggcatatgttatcctttttatatattctagaattcagttagctaaaatttcatttagaatttttgtgagtgttcatgagggatattgggccgtagtttacttaaaatggttttgttttgttattttctttgtttgtattccttttctgaagtaccttttaaccttagttgccatcttactttctctcactattttcagaggatgaacactttttataagaaatctgctgtgttttgagtgctatatgccaggaactacaagaaacccttcatattcgttatttcatataatcctcagaaccttcttcaagatagatgctattatgatgcccattttagaggtggataaaacggagactcagagcagttaatttcccaagtgatagaggcagttcaaattacgtctttcgggctgggcacagtggctcatgcctgtaatcccaccactttgggaggctgaggcaagaggatcacatgagcccaggagtttgagaccagcctgagcaacatagtaacacattgtctctacaaaaaaattaaaaattagccaggcatggtggcatactcctgtaatcctagctactgggcaggctgaggtgggagggttgcttgagcctgggaagtcaaggttgtagtgagctgtgattgtaccaccgtactccagcctgggcaaaagagcgagaccctataaaataaaaaatcaggtctttcaaatcagaggttgaaaacggctctgcatttatatctttctttagaaatattttattaatctgaaatattactgacaaaactaggaggaatttagaaaactatacctctactaatcttttttctcttcttttgattttttttttttttcccttaagacagggtctctctctgtcatccagactggagtatagcggtataaattcggctcactgcaatctgtctcccaggctccagcaattctcctacctcagccttctgagtagctgagatgataggtacatgccaccatgcccagctaatttttgtatttttagtggagacgaggtttcaccatgttgcccaggctggtcttgaactcctggnnnnnnnnnnnnnnnnnnnntgagcccacctcatcctcccaaggtgctaggattacaggtgtgagccaccacacccagctaatctcagagcacctctttatgctaattggttttgatattctctgtgtgcttatttttcagtttgaaagtgtctaataattagcatattagggccaggagtggtagctcacacctgtaatcccaacactttgggaggccgaggtgtgtggatcacctgaggtcaggaactcaagatcagcctggccaacgtggtgagaccgcgtctctactaaaaatacaaaaattagctgggtgtggtgacaggagcctttaatcccagctacttggcaggctgaggcaggagaatcacttgaacccgggaggcggaggttgcagtgaaccaagatcgcgtcactgactgcactggagcctgggcaacaagagcgaaactccatctcaaaaaaaaaaaaaaaaaagcatattagttcactaatttgcaagttttatcaagcacacattattgtgaattaacttgagtgtttctaattggatatgtcaacctaaaatgaagaaatggaggcaaaactaatataagtggagagtttatttgggccaaacttgaggattacaacctgggaacatagattcaagtttccctgaatatacactcctgttagcagcagttacaagtggagtttgaaaggcaaaatagggggacagggggtggactgtacaaagttgtttgctagcaattctcactggtttacagaaccagtgagaattgattagtgattgactatacgttgttaacctataaggtatggattatagtgttattataattcacacctgatgtggattattaagctaatttatggctacttatggcaatagtaagcagtttaaacagatgaatacatagctcaaaggaggggagtaggcatgattgtaatctcattttaatgtctatctgggcctgatatttaaaaggacttgcattcctcagataaaagttcttttcttttctcagttgctacagtgcttcagtttaaacttcacatctattggaagtctttcaacgttgttaatctggattagagatccttgagagaaaatgccactttcttttttactatactgtatttaatatgctcaatagtatcaataggcatatttctgtttatgtaagattgtagtgtggctgaaggctgaaggggggcaagagcacatgagaagctattgcttccacttatctgcttttcccaggttgaatgtgtgctagattattttaggaccttttgggctcaaaaaatcaatggggaagcctgaatttagatgatagctagctggtgggacccaacttaattttctgtcttatgcttcggtcaaatttgggaatatacacaaaaaagcaaagctacaaatagagattggcaatacagattaaaatgtgccaggcaacaggaggaatttcgatgagtagaaatgaagattgatccctgagacaaaatagcggggacaggcaggaaaaaggtagatttctacccttctctacttcatacctacaaatttaaggaagtaggatctttaccaaccagaaacttggcagcttcccaccaacgccgtgttgcaactgctatctgcaacatccagggctctttttctccctcccatctctcttatcattacctctgtacttcccttagtgaccacagctctgtaaaggcagtggcagaagtggatttgttgggggtacgttttcagatgtgatgaaggtagtggtgagaaggggcaaagagaagaaaatccatgggagtagtatgccttttctcaggccctactttagacagacacacagattaagctttttattatggaaaatttcagatatttacaagagtaaagagaacagtttaataaaccagtcaccaggttaaacaactcttggttaggtcctgtttttgactaggggagaactatattctgtttcaaagtatgtaggattagattgccaatcacgtgcacatggaacaagacaacagggtcagaagatcttccttagtttatcagcgccatagtaaatcaggggatccctacattagatccacaaattgactttaagtcatgacaaactgaattgatgagcaaaattgtgtgctctagatagtatataattttaatttgatcctcaaagggatctttaatcctccaaataggtgagagccatagtattatgtgactgctcaatactaggtctggcttgtgtggataaagtttaaagtcaggccaggcacagtggctcacgcctgtaatcccaccactttgggagaccaaggtgggcggatcacttgaggtcaggattttgagaccagcctagccaacatggtgaaatcccatccctactaaaaaaaaaaaaaagtacaaaaattagccaggcatggtggcatttgcctgtagtcccagctacttgggaggctgaggcagaagaatcctttgaacccgggaggcggaggttgcagtgagctgagatactgccactgcactccagcctgggtgacaaagcgagacttggtctaaaaaaaaaaaaaaaaaaagtcaaataatacctaggtggacagagaccacctagaatttacttaacttttttcttagaaaacaccaaacctggatagatttctcaactttcaaataattgacagaaatttttaaaggcatcgtgggatttattaagaaattcttcaaaacacgaccaggtgtggtggctcacacctgtaatcgcagcactttgggaggccaaggtgggcggatcacctgaggtcaggaattcgagaccagcttggccaacatggcgaaatcctgtctctactaaaaatacaaaaattagcccggtgttgtggtgggcacctgtagtcccagctactggggaggctgaggcaggagaatcacttgaacccgggaggcagaggttgcaatgggccgagatcgtgatcgtgccactgcactccagcctgggcaacaagagtgaaactccgtctcaaaaaaaaaaaaaaaaggaaagagattctgcaaaataaaagaaggacatctgatatttaagaaacagaaaaaaattatactttgaaaaagttgagaaaggaaacaatattagatggtattttctttattctcatggggtttgtttaatgaatctgaaaaatatgtagaagatagcagattgccatagaaggaaaccaactgagatgtcagcaattataataataataactaaatatatattgagtaccagattctatattaaagccttcatgaattagctaattaaatctaagtaaatggttattcccaagaacacggaggtaaagaggttaaattacttccctaagattgtataactaataagaaggaggtctcagatttgatcccaaatacactttgacttcagggacctagagagagaagaaataaggatgatttcacaggatcttggatcatcctttgtactcttctgcgttggaattttaaaagaaattatttagggccgggcacggtggctcacgcctgtaatcccagcactttgggaagccgaggtgggcagatcatttgaggtcaagagttcgagaccagcctggccaacgtggtgaaactctgtctctactaaaaaatacaaaaattaggccgggtgtggcagctcacacctgtaatcccagcactttgggaagccgagatgggcagatcatgaggtcaacagatcgagaccatcctggccaacatgatgaaaccccatctctagtaaaaatacagaaattatctgggcgtggtggtgcacgcctgtagtcccagctacttgggaggctgaggcaggagattcacttgaatccgggggaggcagaggttgcagtgagccgagatcgcgccactgcactccagcctggcgacagagcgagactccggctcaaaaaaaaaaaaaaaaaaaaaaaacccttttgctgctgccgccgccgcagccatgagtatgctcaggcttcagaagaggctcgcctcttctgtcctctgctgtggcaagaagaaggtctggttggacccgaatgagaccagtgaaattgccaatgccaactcccgtcagcagatgcggaagctgatcaaagatgagctgatcatcagcaagcctgttgacagtccattcctgggcttgatgccggaaaaagaccttggcccgccggaaggcaggcacagtggcataggtaagcggaagggtacagccaatgcgcgaatgccagagaaggtcatgtggattctgcgccggctgcttagaagatactgtgaatctaagaagattgatcgccatatgtatcacagcctgtacctgaaggtgaagggaaatgtgttcaaaaacaagcggattctcatggagcacatccacaagctgaaggcagacaaggcccgcaagaagctcctggctgaccaggctgaggcccccaggtctaagaccaaggaagcacgcaagcacggtgaagaacgcctgcaggccaagaaggaggagatcatcaagactttgtctaaggaggaagagaccaagaaataaaagctccccctttgtctgtacatactggcctccgtgattacatagatcagccattaaaataaaagaaacctttatctgcttgtaaaaataaattagccgagtgtggtggcatgcgcctgtaatcccagctacttgggaggctgaggcaggagaatcgcttgaacccaggaggtggaggttgcagtgagccaagatcgcaccactgcactccagcctgggtgatagagtgagactcagtctccaaaaataaataaataaataagagtaaaaataagcggccgggcgcggtggctcacgcctgtaatcccagcactttgggaggccgaggtgggtggatcacgaggttaggagatcgagaccatcctggctaacacagtgaaaccccgtctctactaaaaatacaaaaaaattagccgggcgtggtggcaggagcctgtagtcccagctacttgggaggctgaggcaggagaatggcgtgaacccgggaggcggagcttgcagtgagccgagatcgtgccactgcactccagcctgggcgacagagcgagactccgtctcaaaaaaaataataaaataagcatcgccgggcacggtggctcacgcctgtaatcccagcactttgggaggccgaggcgggcagatcacctgaggtcgggagttcgagaccagacttaccaacaaggagaaaaaccgtctctactaaaaatacaaaaaaattagtcgggcatggtggcccatgcttgtaatccgagccacttgggaggctgcggcaggagaattgcttgaacccgggaggcagaggttgtggtgagccgagatcaagccattgcactccagcctgggcaaaaaagcgaaactccgtctcaaaaaaaaaaaaaaaaaaaagcgtccaggcaagaggtagaaaagagactgctacaaaaagctatatataaaattcatcacagattttctgctgcactaataaatggtaaaaaaaaaaaaaaaaaaaagaaaagaaaagaaaagaaagaaaaagaaacactggccaggcacagtggctcacacctgtaatcccagcactttgggaggctgaggcaggcggatctcgaggtcaagagatcgagaccatcctggccaacatggtgaaaccccgtctctactaaaagtacaaaagtacaaaaattagccgggcgtggtggcacatgtctacagtcccagcttctcaggaggctgaggcaggagaatcacttgaacccaagagatggaggttgcagtgagccaagatcatgccacaacactccagcctggtgacagagcgagacttcatctcaaaaaaaaaaagaaacactatttacagtgttattaggaaaaagaaaatgtctgcactgttattagcaaaagacaataagcgatagtgttgaagagcagtgaacataatagagtgacaaatataagaccaccttattagtaattagaataaaaatgaatatgttaacatataagtttaaaagatagactcaggaattgtcaaaaaccatatctaagactcacattacctgatttttgaggcctactataaagctgcagtaatcaagataatgtgttattggcaaaagaatggacacatatatcagtagaacagaataaagagcgcagaaatggactcacccaaatatagtcacctgatctctgaaaaaggagcaaagacagtttaatggaagaatgggttttttcaacaaatgatgctagaacaatcaaagtccgtatgcaaaaaaatgaacctaggcatagaccttatacctttcacaaaaaattaactcaaaagggatcatagacctaatgtaaaatataaaactataaaacttctagaagaaaatctgtgtaaccttgggtttggcaatgatttttagatacaacgccaaaagcatgattcatgaaagagaaaactgatgttggtgtttgttaaaattaaaacttcttgtattagtccattttcatactgctatgaagaaatacctgagatttggtaatttataaagagaagaggtttaatggactcacagttccacatggctggggaggcctcacaatcatggcagaaggcaaaggaggaacaaagtcacgtcttacatgatggcaggcaagagagcgtgtgcagaggaactgccctttataaaaccatcagatcttgtaagacttattcactatcatgagaacagcatgggaaaaacccgccctcatgattcaattacctcccacctggtccttcccatgacacatggggattaagggaattacagttcaagatgagattttggtggggccacagctaaaccatatcacttctactctgagaaagatactgttaagagaatgaaaagacaagtcatggactggaagaaaatactttcaagatacatttctgttaaaggactttgtggttagtcaattgcaaagttttgaagccatgcacaagtcagccctcacttatgacatcagttgcaagttcaggggtttccagaacttcctttaggattgataattcactaggagaattgacagaactcattgtaagctgttatactcacagttacagtttattacagctgaaggagacagattaaaatttgtcaaaagaaaaggcacataggacagagtccaggaaattatcaaatacagttataaaccccacaatacatttttagtggttgctttagagtcttgattatcttttttttttaaaaggtcttgctctgtcatccaggctgcagtgtagtgttatgatcatggttcactgtagcctcaaactcctgggctcaagtgattttcctcccttagcctcctaagtagctgagagtacaagtgtgagctagcacacccagctaatttattttttattaaaaaaagttttagctgggcgtgatggctcacacctgtaatcccaacattttgggaggccaaggtgggcagatcacctgaggtcgggagttcaagaccagcctgaccaacatggagaaaccctgtctctactaaaaatacaaaattagccgggcatggtggcaatgcctgcctgtaatcccagctactcgggaagctgaggcaaaagaatcgcttgaacccaggaggcagaggttgcagtgagctgagattgtgctattgcactccagcctggataacaagagcgagactccgtctcaaaaaaaaaaaaaaatttgtagagatagtgttttgctacgttactcagggtggtctcaaactcctggcctcaggcagttctgcctaagcttcccaaagtactgggattacaggcagaagccactgcgcctaccatagaatattagttatcttttgaagtgattaaaaagggaaaagattttcttccagtttaatgatgagaaaagtgaaagaacagttattttaaagcccctgatatttccaacatctaggtcataaatgagtctcgttctgttgatagctttatctcttggtaatgtgcatgcctgtgtgtgtgtgtgtgtgtgtgttttattttgtgtatgtcttataatttttagtttaatggcaaacatcatgtatacaagaacagtagagactgaggtagatggtattttgtgtctggatataggcacgcctctcccatcaggccaattgcctgtgacattgagtcaacctagtctggagttgaggtggatttggattttgatgttggtatcattatgttcagtgtacttgggctgctgttacctggtacctggagcctggggtaccagatggtttttcttcagtgtttctgttccactgttggctttcctcagtcccatcatgcctccatcacagagggggagtctctattcatatccttgccccttcactagtggttgactgatgctgcttgttactcagtgctaggcttatggtggtgtcataggtggttttctattgtcctggttcagccttagctttaggcagtccctgttcatttgaaccccaggggtggtacttaatctgccctttcctgagcagtagcaaacctctgcttggcatcagaatcctgggccaatgaggattctctcctgctctcccagaaacaagatgtttgcttctacctctcccccagcagcaatagggtatgtgagaggtgggaggtttacttgaacccaggaggtcgaggctgcagtgagccatgatagtggcaccacactccagcctgggtgacagagcaagaccctgtctcaaaacaacaacaacaacccaaaaaactgtcaaggtcatcaggaacaaaacatagccaatagccaagaaactgtcacataccagaggagactaaggaaacatgatgactaaatgcaatacaaataaaaaaataaatattggcactgtaagaaaaaatagggcagcagaatgggtaattcacaggagaagaaatgcaaatggctaataaaaatatgagtatgaattcaacttcactagtaattaaactcaaatgtaaatgacaaaaactgatttttgccagtgacattagcaaaggattgtttttgttaatactagcatttggcaaggttgtagagaatatgggaactcagaataatacagcctctctggaggataatttgcgcagtatcatatcaaaaggcttaaaattgtacaaattatttgacttagccatgtctgtgccgttgatttatcttaataaagtaaaggaagatctgtgggaagatttagtcaaagggtgcctatcacggcattgttaataataatgaaaaattgaaagtagcatgataattaacagtatattgtgatattcttgtatggtgatattctgtagatattaaaagttaaacaatttgttaagttcaaaaagttaaactaacatgtatggtgtgatccccttttttgtaaaaaaaaatatgtatcatagaaagactcgatatgtgtacacaaaacattaattgtaatttttggatgattgaattctagatgatttttgtttcctcctgtgtgcttttctatattttgcagttttttctgacatgagcatgtgcagtattttggacattatataaaaagctatttaaaaacgaaatctttttcctctatcaattagcaaagattttcttaaaattattacctttgttggcaaaggtatgagaaattggtatctttattttatatccacttcttattctacatctatttaattcttctcatctacagtatttctacttattctcttttttttttttttttttttttttgagatggagtctcgctctgtcgcccaggctggagtacagtggtatgagctcacctcactgcaagctctgcctcccgggttcacgccattctcttgcctcagcctcctgagtagctgggactacaggctcccgccactactcccgactaatcttttgtatttttagtagagacagggtttcactgtgttagccaggatggtctcaatctcctgacctcatgatccacctgcttcggcctcccagagtgctgggattacaggcgtgtgccactgcgcctggcccttctacttcttctttatatctacttctgtaggggatcagcacaagcactcttgggaagcaaattggtaataaatatcaaaccccttaaaataatttatattctttcactcagtagaaaggcttctgggggatttgtcattagaaaagaatcagagatgtgggtggagacatgtttattacatgataatgtataactgcaaagtatgaagactgtaaatatccacttaaaagggaaataaaatatgacacaactgtatagtggaatattatgcattcatgagagtatttaaagaatatttattgatgtctgataatcttcttgcttcttagtcttctgctcagaatggcatccatgattatgtttctttccccatgttttttactgtagtcccagataagaaaataaggactggattccctctcttactttgtgtaaataaccacaactagtaaattacttttccccccacaaaaccatttccttatgtgtatttgtcttcctcagtttcaatttatttgctttactttaattatgggtattatgtgagcctttgcacagttctgtttttctgcctgaaattatcttctccctgcttttaccatggctgagacctcttcaccttctaggttgcagcttaaataatactcagagaggtcttcttggaccaccttatctataataaaagagcatacaatgtattactaataccctttaccatctctctaatgcccactagtttttttcattgcagttaacacagttgatgatgtttttgtatttatttgcttgtttataatgtgtcctccagtagactgtaacttcctgaggctaggaattatatcttcacaagtatatttttaggtcctctcctaatgtctggcacatgtaaacagtcagcaaatatgtgtagattgaatgaacaaactaaattttgcagttttgatgacagcttattaagaatttatcatgttacttagttgaaagttgtcataccaaagttattcttataacacatatttattttagctatattggtttgatatttaatatattttatgtaggaatgtagaggaagaagtttaggttacactcgaggtcatagagagtcttataacgagttcagactaccattggacgctgaggagtgtgtagaatttgaagagacaaagaagagggggaaagacattttgaacaagactgccccatgagttttttaagacaggacagcaggaatatctttagcatgtttgggaaaacatgacagagaattgtgggtgactaatggagctacttgctggtaattataaatggaatgttactagttagaaaatttcatctaggtctaatcattaagagcctggaaagaaggccaaggtagttggaatatcttttgtattcagggcagttcttttaacagatgggaagctactgaaggtatttgatcaagtgaaggtcccttgtcatttattaatttgtttattaatagatatttattgagtgcatgctgtctactatgtggtcttctagatgaggagggtacagagatggaataggagggctggagagccaaaaaccggctgtggaggaactcgcagactacgggaagtgacagacatgcaaattacaaagggttgtgataaatgttgtaataaatgcacatcatcaatactgtgggaactcaaaataggaccaggtttattcagatagttgtgaatatcttaactaaggaggtgacattttctatgggttttggaggataagcattaatttaccaggtaaagaaaattctgaccttagcagtaaagtcatggaccattcagggaatggtaaataagtcatgcacctggaattgtgggagatgagcctagaaaaacagttatcctaaaacagttatccattaaggaccttgtattatctatttaatgaggaaccatcaaaagttctcatatagaggactgaagtgatcttctttattttttttcccatccagaatagtttacttggcacaaatggactagtatatgacatggagaacagtattaggctttagttagctttttgattaaaatctactcattgaattcatatctgtaattaatactgatagtcaccaagtatgtggactttgagaagtcaagaacttgattagtatttagtccattttcacactgctgataaatgcatacctgagacatggcaatttacaaaagaaagaggtttaatcggacttacagttccatgtggctggggaagcctcacaatcatgctggaaggcaagaaggagcaagtcatgtcttatgtgtatggcagcaggcaaagagaggagcgcttgtgcaggaaaactcccacttatagtaaccagcagatctcatgagtcttaccatcacaagaacagcaccagaaagacctgcccccatgattcaattacctaccaccaggtccctcccacaacacatgggaattcaagatgagatatgagtggggacacagcgaaaccatatcagttagaatctcagttttaccacttgctagcatttatgcaagttatttgatattagtaagcctacgttttctcatctctctcaatgaggcttatgagtggtttatgggcacttttgaccaaggagatgtaatgaggttgctgttagatgggggagacagtcaaatgagactcttgattagacatactattgtctcagtgtactctgagtgctgagtgaagacagaccttgagacagccataaaaagatagaaatttaatccataaatgcaattagttcaaagtaggtttttgtatggcatgcttaaagatttggaggcaggaactactgaaagtttttaagcaggaatccatatgttccacttttcccaaacagctcctaattatttatggtgtgcccctttcactcctaatggtaattcagtttagataataaattatgtaatcagtcaccttctgaaacaacagtacagcaaaagagatggctgtggttgagccatttagaatacaagtaataagaaaaaaataaaggaaccactccacaagttttggggtggaaacagagaaggaatagtctttataaaagccaagagaaggctgggtgtggtggctcacacctgtaatcccagcactttgggaggccaaggcaggcggatcacgaggtcaggagatcgggaccatcttggttaacacggtgaaaccctgtcactactaaatatacaaaaattagctgggtgtggtggcgggtgcctgtagtcccagctacttgggaggctgaggccgtgagaacctgggaggcagagctttcagtgagccgagattgcgccactgcactccagcctgggtgacagagcaagactccgtctcaaaaaaaaaaaaaaaagccaagagaagattgttgtaatagtattaagaagatgggatttgtaagatcagcaaggccagatacagcaaggctatggagcataagcacacattattagatttatcaaggcagagctcattgtctgctttagacaatgcagttcatttgagcagttggatagaagccaaattgggtttttgtttttttgttttgttttattttttgaggataaggacaatgtcttgtttatttttctctctctagtgcctaactgtggttgtgtcagaggtacttggtgcatttttgaagatttaataattaattaatagttggtgcaggccaggcatggtggctaacacctgtaatcccagcactttgggaggccgaggtgggcggatcacctgaggccaggagttttagaccagcctgaccaacatggagaaacgctgtctctactaaaaatacaaaaaaaattagccaggcgtggtggcgcatgcctgtaatcccagctactctggaggctgaggcgggagaattgcttgaacctgggaggcggaggttgaggtgagccgagatcacgccattgcactccagcctgggcaacaggagcaaaactccgtctcaaaaaaaaaaaaaaaaaaaaaagttggtgcaaaagctgagatagtggctatagataccacactaaaaaattttagtgattaaagagagatgggaagtatgatgtttttagtttggttagcagttagaagggaacaatctctgcatttgaagtgttaagatgaactcagtgggaagagaaatattaaagtttctgaagagggaagtaagtttgaaagctaaagcccttgttgcctacaaaagacccttttgcaaagtggaccctcctggttcagttatctcaccctttgggattctgtgtgccagctgagccaactaattcctttcatgttaaactagtttgagttcgatttctgtcccttataactaaacaaatacttgaatttggatgaagtattctgactctaatgctcatgctgtctccactgtaccatatttcttctctaaggctaaaggtattatctccaaaattttgtccctccctaacttgtgggggctttagtgaactatttctgtcctctctagaatctttgctttctttccctcctatagatccctcgccacgtagctcgtgtaggcctcccttatctttgtgaagccttaaacttaattctgtgggccccactaagttgtgataaagcatgcataggggttttggtagaagataacgttaacacaggtagattggagctgggtctatgttgaaaaaaatttggattactaatttaagtggtttgccattgatttctagatcagagatgtttaatagaactttcttcagtgatggaaatgttctatatctacagtgttcaatacagtagctgttagccacatgcagctccatagagcacttgacatgtggctagcatgactgagaaatcaaattttaaatttaattttatgtatttatctatttttataagacagagtctcactcagtcgcccaggctggagtgcagtggtgtaatctcggctcactgcaacctctgcctcctgggttcaagtgattctcctgcctcaggctcccaagtagctgggattacaggggcctgccaccatgcccagctaatttttgtgtttttagtagagaggggtttcaccatgttggccaggccagtcttgaactcctgacctcaggtgatccacccgccacagcctctcaaagtgctgggattacaagcataagccactgcgcctggctgattttatttaattttaatcaccttaaatttaaatggccacatatggctaaggctaccattttggatggtatagctctagacatcagaagttatatttctcattttgttttgtttttaaactgggagaatgatatatgttagaaaaaaaatggaaacaatgtgggcatttgggtggtgaggatgaggcaagaagaaaatcactttctgttcttgatattaatgcctttaacaaggatgaggaacctaggaggatgagtgggtttgggaaggtagacaggaagttcaatactgagttgagattatgggatatataaacagagatgtccaataggcatctaaagaagagtttacagcagaacagaaaaagccagggctagaagtataaatttctgtagtcatctttgtagaggtgataaagctatagaatataggtcacatcctctagagtgggagtgtagatcttgaagaaaagagcattgagcacagaactcagaaaaatgtgcatattgaaagagtcgagctaagcgtagtagctcacactcgtaatcccagcactttggagggaggcaggaggatcacttgagcctaggagttcagcctgggcaacatagcaaaaccctgtctctataaaaaatacaaaaattagccaggcatggtggtgcacacctgtggtcctggctgcttgggaggctgaagtgggagggatcacctgagcccaggagattgaggctacagtgagctgtgatcacaccactgcacatcaactccagcctgcatgaaagaacaaaaccctctctctcttaaaaaaaaaagagagagagagagaaagaaaaaaagtggaaagaggaagagcagcaggcaaacaggaaatatgaaatatttactatgcaatgtttttaagaaattggcacctaaccatgcaagtgatagcagaaagtttttgccttaggtgtagtgcttgtcaggaagatcaatattttacttgaaaatgtaagtacaggtacaatgtaactaatttctactgcttcattatatagatctgatagatagtttttatttggccaatgcctgccatcattacactattatagtgttatttctgcctatagaatcataaatgtgtctgttaaatgggcttaatatttgggcagattgccaataaatgtcacaaactccagtccaaataaatcagtttataaacctaggagaatgtctagctacctttggtgttttccagataatcagtagttgtaattaatgatgtttaaatggattttctacataagattaaggagaaattgtttgacacaacctatataatctgcatttttatcatctgagtgggaagtcttattactttccccacactgtgtcatacacttgcagaagaacataaaaggtagtgattatgctacgtgccaagaaagacatcagagcagattgaaggggtgtagtatgagtaaagaatttgagaccagagaaaaggctctggaaaggaaggcaagcatggagaaggaaacttgaaggaatagattggctgaaggtcagatctgtggagtagacagtaggtaacaggtcaatttgttgcccagctcagtgcctgatacataataggtgctcagtatttattgaaggaaggaatgggaaaaggaaaattcattctgcaagaacagtagaatcctactttggccccaccttattttatttgtcacttgacctcagttatcacatctttctgaccttgggttgctgttaggtttattgttaaaacatacactaaatagtttatattttaacttgtaattgttgtctagctctggacaattggagggccgggggggtgctctcctatttagagaacacgggaatacgccgggcgcggtggctcacgcctgtaatcccagcactttgggaggccgaggcgggcggatcacgaggtcaggagatcgagaccatcccggctaaaacggtgaaaccccgtctctactaaaaatacaaaaaattagccgggcgtagtggcgggcgcctgtagtcccagctacttgggaggctgaggcaggagaatggcgtgaacccgggaggcggagcttgcagtgagccgagatcgcgccactgcactccagcctgggcgacagagcgagactccgtctcaaaaaaaaaaaaaaaaaaaagagaacacgggaatatacttgagtacttggatgtttaatttccttttgttttaagactataacagagtaggtgtgaccatatctagcccctgaatattctggccttgggtgacacaggtgagcacttctagctgatctgacaggttaaaggtgtacacttattttctctgtaagaagcgtcatctggtaagatgatcaagaatggtgcaaagcaggatggggagtttaaaattgtttccaaatgtgggaatgtaaatgaatataaacatgtaagattttaatataccaaactgatcagattctgtgtaatttccaagtttcttttttctttcaaaactcctctgaaatctgactgtccacaaaaacttactttatagaattttatgtgatttatttactcagatattatactgacctcacatccagtagtgaaaacagattttattgtagaatctggaaagatagagggccatataggttgtattttcagttttgtttatactaacacgtgtttacaacccagtttaatttacaccctgtattgtattattgttgtcatatctctgtatgcatgtaagtataatatgtgttggcaaaggaaaattttgagtaagaagaagctctctgatctatttgattcaatatgtatttgagtgtctaacagacactgttttagacactggtgatacaacactgaacggagcaccaaatactttacagcgtctcctggagctgttgtcaagacatactttccaaggggaatatttcagaataggtgataactagtcaacgaaggaaaagtaccttagtcatctaggagagttgtacttagagtgaactgaaataaactaagctcacgaaagacagagattttttgtttggcttttgtctgttgcattcactactgtatctccagggcccaaaatagtgctcggctcataataagtattcagcaaatatatgttgttgattggagtgtttgttttgaatttctgtaatcaaacacataccttggtaaattatctttacatcttgctagttgaaaattttatctcagttgctttgtttttaatgttaccttgctttttgtttctacttgtgccatacatcaggatgctggaaaagcttattaatattgacagtcatatggttatctgatattgaaaagaatagatttggaaaggaacctaagaggtcatcttttgttcagcttcctgcctaggaaaactaagtaagatgattaggtatgtatatttaattagtcatttaaaaaaaaccaggacaacataattgagttccctcttgagaaaatggagaaaggtacttaaccctagctataaagggactaacctggaaattttagaacttctgtgtgggaaagtggaaaaaaaaaaaaagcacaactaagctgctctttgttgatatcagaaatgggcctgtcattcattttggcattgaagcatagcctcctatctcggggcaggactgggacatttttttcctcccacaagagctggacagttattacaggttcaaaaagccccgaccagtttttcaagagtttctcctcctcttttccccctgaaactcgtggtgcttttgctctgctttcaagatgcattaagtctcctgctttgtgactgctttggagccagcagatactctgatatgtataattcaaattatgcaggtttcacgagtaagtttaatcttattttttaagttagttaaaaggcaagtgatatttagaaaaatgttaacttgtagttatttcaccctttttactttaagcatttttattgcttctcggccttttggctaagatcaagtgtgtactttaagcattttttaaaataaaaatatccttttaatttaataagaaaacaaggttctacatagaaaagccccttcatctaagacctgcacttttcaatttcttttgcgatgtctttgttgtaaacagtattcatatgtcttttgaaagccagttaactaaacagttttcttgagcatctttttagttttactgagaagtattttaaattgagcttttctgagctcgattgcttacgtctgacacagtctcaagtttccactgaatggtaacaaagactgtagaatgttgttggtactgcagtgagaggcatgcttccttagaccaggtaagagagatcagtttgtttctcactgctgggtgagtttttacagctcttattttatattctttaagcagcagcaatattaaattgataaatagccaggagcacgctgatttcaagacgtccttgcttgttgcagacagaaaaactacagggttatgtatgggggttggggtggggggggaggggaagaattagtttattactcagttacttatataaattaattaaaatgtgaaaataattctggagctcagttttcttaattcaggaactaaagcagcagttgaggaaatcagtaattttaaaggtacttcatggttattacttgtgaaagcaattcaaaggatagtttttactttcatttttttccccagtagttaataaaataagctttgcccttaactaaacattttttccacttacgaaaacttttaaattgccaacagcaaaatatacttcccaaggatccttggaaatcaacctgacacttgaaaaatatttcagcttttatagctgtttcattcctttttttccctagtacatttttcttaaaagtatttgtgctttgaaaatgtcagctgtattctaatgaagcttaggcattgtttgctcataaaggggccggtgcattccactgctttatggtttattatgaggcacagtgtgagagtgtgggtggcaccatttggtgtctgcctcttggggtagtgactgccattatgttagccttggactggcaaagaaaatatagcatacaagatgctatatgaatctggatactgtgaagaaaatcttacccctaaacaattcttaatgaccccggaatatatgacaacttgattgaattgatcatttcaattatacccttgaagtttgcattttagttacaacgtatattctattagacacgtcttattttttgatatataatagcatttagtcattctttgaagttcaataaggaagtgaatgtttctaaactatgatgtttttaatagatacagtgaaattttaaataatacatttacttaaaaaagttttaaggaacttagtgtgggtggggagcgggagtgggagagggagagggagagggagaggaggtcaggcagagagtctttcttctttcagttaggaaagccctggtgaagaaaaaaagcaacagatgtttcttctgttacaattgaggttgtttcattcaaaactcagagtagctggaatggagagaggaggtcataaatctgatttaatcagtgaataaataaaatttagtcatttaaaatttattattttatattcaggaattgaaagtcatagagtaacaaaatgagtaacatacccaatatttaaaaaaaaactttaaatattgcctgtagcctgtataattaatgaaaatgtgagaaaattaattctgttgaacttcacttaaggaaaaaattgataattaaatcatatagaccatttttttaaagcctaagccatctaaaatatagaggaaacagttgcaaaagtttatcactagacagtaggtacaaaatctcaaaatgaaaataaaatgagaaacatcagttacatatgttgatagatgatttcatcttctgtgagaagctgaggcttattcctaagacctttgcataagaaatatgggagtaatattttgggtttaattgaaatgatatgttgcagtttgcctctaaaaagaaagataataagcttggattggttgctaatggaaagaggagaatgtttatctgctgaaaagagtaggaatgaagagtgtggaagcattatgcgtgtaatgaaagcagtcaaaattttgaaaaacagtttttgaatttttggaattcataatgaggaaagtgaaaacctttccttttacaagtaacacaaagaagtcctatgctgttgtataatgtgcgtgtatacacattacaactttattcatttcttaagtttgctcttgaaaaatcagtgctgagcaccagctctttcacatatgaggcacttattcaatatttgccataccctacactggaaaattcgtagtaatttacagtagccaataaagtttttgagctatagtttaaaatttgcatatggattaattattatacagttttctaaataattggcctaaggagagagaaggctggaaaagatatcaacattcaagcagattattaaaaattcctcttgctgttagctaagatctgtgggcttacctgaagttatttttttgttgtttttttttgttgtttttttgtttttttgagacggaatctcgctgcaagctctgcgtcccaggttcacaccattcacctgcctcagcctccccagtagctgggactacaggcgtccaccaccacgctcagctaattttttgtatttttagtagagatggggtttcatcatgttagccaggatggtctcaatctcctgacctcgtgatctgcccacctcggcctgatggtctcgatctcctgaccttgagatccgcctacctcggcctcccagagtgctgggattatgggcgtgagccactgcgccggccagaagattttcttttcttcaaataatgatgaccaaatttagagattttgaagtttgtttgttttttgagatggagtttcgctcttgttgcccaggctggagtgcaatggtgtgatctcggctcactgcaacctctgcctcctgggttcaagcgattctccttcctcagccccccaagtagctgggattacaggcatgcgcccacacgcctggcctttgaagtttattgaatcattatttcaattaagattcagattctaaaacttatctatgtacattttgcttatcttaaggaatagcaacatgtaatggttgaggttttttctctctaaaataagtaaaacaatttacatggactttaaaatggatttacaaactatagatttgcctaaagaactttttttacaattctgatcaaagaacagaaattttgatggaatagacaggcttaaaaaaaagttggtcactccacatgtaatacataactgtgacagcatcatagattgtgattataaaaaatgtgtatcacttacaattataaatgtagacatgacaataagttacttaacaaggaaaacagtatcagcaacagcaacaaggacatagtttggactcctagcccttcaaattgagaaatgaagaccaaaatcagttgaattattttaagatgaattcccactgcctctgtatgtgtaaattatcttggaattattgaatgtgtggtcaaattatggttgagaagagcacattagttttagcatatatggagtatagaacatagagagtataattttctatattatattgttgatttatactctatgagaaaccaaaccattcaagtttgttacctggaaattggttgggagtgtctgaaggaaaaaacaaacaaaaactttcctaattcatctgccatttagagataattccttaattgtctttaatttctagtaaatacttccagtcataatcaatttaaatattaaattaaatcttttttttttttctttgagacagagtctcgctgttgtcgcctgggctggagtgcagtggcacaatctcagctcactgtaacctgtgcttcccgggttcaagcaattctcctgcctcagcctcccgagtagctgagattacaggcgcccgccaccaaacccggctaatttttgtatttttagtagaaacgggatttcaccatgttggccaggctggtctcgaactcctgacctcaggtgatcctctggcctcgacctcccaaagtgctgggattacaggcatgagccattgcacccggtcttaaattaaatatttaaaatgtatactgaaagaagacttcaggagtacctgaagttcttgctttatgtatgaactctttatcacaaaactgaggtcttagaggaacctgagccttacctatttattgtaacccgattcagaatacccagagaggtcaatgatttagccttttttttctgccttacatatacatatgcaactagaaataacagccaccttgaaatttctcatctctggagtggagtaagaggggagatgtgcctgatgcctatatttctctgaagagaaaaccttttacattgttgaggagcaggtagaccagtatgagtatggtgctttgagtatattatgaattaactatgttttgtgaactgatccaggaacctgtcatgtaattatgttgtttctttctaccaagtttcaagaaaccaattttcaaatgaatttttacatggtaactctaaagctggagactatcaaccggggactttggttttggcactttgctcacttgtagtgaaaatttggcaactcttggcaatttctctgacagaaaaatgaacagaccactaagtgagcacttactgtgtgccaggtagacacagtagaacttatttataaaagttctcaaaaatcttttaatgggctgggcatggtggcacatgcctgtaatcccagcacctggagaggtaggcagatcactttaactcaggagttcaagaccagcctgggcacatggcaaaatcctgtctctacaaaaaatacaaaaattaactgggcatggtggcacgcacctgtggtcccagctactcgggagaatgaggtgggaggatcccttgagcccaggtcagggctgcagtgagtggagatcatgccactgcactccggcctaggcaacagagcaagaccctgtctcaaaaaaaatttaaaaatctttaatggataaatttttaatacaaagagattttgttgacattgatgtctaactttaagatttcttgcatttcacaatgtgatttaaatgtagcttcagtaatagccctcaagtagaatatattgttgagattataatatcaataacttactgcagttttgagtgagctacttagtgcatggtattataaaacaacgatcccctcttttatttgctaaggagaagaactgctttggaactcttaattcatgggtggtccttggtccctttgaatttgtatcctaaagttttacatttattttaagtaccccccagccaggcgtggtggttcacgcctgtaatcccagcacattgggnnnnnnnnnnnnnnnnnnnnnnnnnnnnnnnnnnnnnnnnnnnnnnnnnnnnnnnnnnnnnnnnnnnnnnnnnnnnnnnnnnnnnnnnnnnnnnnnnnnnnnnnnnnnnnnnnnnnnnnnnnnnnnnnnnnnnnnnnnnnnnnnnnnnnnnnnnnnnnnnnnnnnnnnnnnnnnnnnnnnnnnnnnnnnnnnnnnnnnnnnnnnnnnnnnnnnnnnnnnnnnnnnnnnnnnnnnnnnnnnnnnnnnnnnnnnnnnnnnnnnnnnnnnnnnnnnnnnnnnnnnnnnnnnnnnnnnnnnnnnnnnnnnnnnnnnnnnnnnnnnnnnnnnnnnnnnnnnnnnnnnnnnnnnnnnnnnnnnnnnnnnnnnncagtgacacgatcttggcttactgcaacctccgcctcccgggttcaagcaattctcctgcctcagcctcctgagtagctgggactacgggcgcatgccactgtgcccggctaatttttgtatttttactagagatggggtttcaccacgttggccaggctagtctcaaactcctgacttcgtaatccacccgccttggcctcccaaagtgctgggattcaggcgtgagccacctgtgcccggcccaggaacccagctttttaattcaaagtctgtctgcagtcatggtcacctcttataaatattagaaaaatatctcacttaactgtaaatttaaaaggatttatctgttacccctgtctggctaccctctcggactgtgagcttcttcatgagagtaatttccagtgaagtactcttgggtatttgagtactcataaattctgatccttgtggttgcactcagctgtcttgatcaactctagccattcagtggctgttggtatgagataaaatgtgctgctttctgtgctttctcttttactaggcctgtaaacagtgtctgtgtgccatctggtgggtgtattgactgttgtgatggtgctaacagtggtgattgaaaatgggctaaacagtgaaaaaatataacacttaagaacaagaaacagaagaaataagggtcactcagactcttttaaaatgagaatagaaataagttcagtgtactagagtccacttgcatttcgttatttccttaatttgaacaaagagtcttaccagaccataagaatcatctgaggcacttaaaaatacaaattctccacctaatttttgaatctttaggtgtccagtggagctcaggagtgtgtgttttgaataagagacacctctcttccctttgtagtgaatcttgtgatcactcatatttgggaagaactgccgggaaggattgggaggatcaagttgtttgaggacatacagtaaacttcctcaattattaatcagaagatacatttcaaaactaggaaattttagttgagcaggtggaagaaaaatgagaaattgaacaattaaaaagtttccttgactgaatatgctaacagaaaaaagatttcaaaaggacatattttaactaaagataaagaagccaatgaaaaaccagcagtatcaaacctacagatgagacaaatgtttttgggtgaacacttaaaaaattattgaaggagaagggccctgcaagtgaccttagtgatttctaagatcttttaggtttgatgaactaaatgaaaccaattataatattccagataccagagcttgaattgaggagtttgcttaagcaatgaggagatactgtttaaatcttgcaatgtggtaagatggagaagaaaaaatgtttttctcctttcaaatttaagaatttagggcattcatggttctagatacaagaaaaggagggagctagctaatcgtttttagaaagtgtcccctaagtgaaaatgttcaacaaagccaagagaacaggtttgatcttctagggaaagtatgtaggaaagactgacatataagatttattcatttagaaatatgaccatagagctataaatacacttaatattatggtcatttcaaggatcctttggaaagattctggttaggtgatccatttgggtgaatcctgaaagttctctatgttctggcagctgcagaaacattcaggcttttccttccgtgtatgtgatatgtaggaatgtgcgtgtcagattttctgtccttatctttgcacaatgggatgcctgatctccatttagaaccaaatagaaagaggaaggttccagaggtcactttaaccattatactttggagatattatgaacttttttatcttctctttgtcacccatcccaattatagtgatgttgaggtcattcagttaaaaagttttgtaatagtgattaactttgtatttaatcttagtgacttttggcgaacatggttcagtacaaatgcatcaaaataaaacataacagtggtgtaatgtgcatgtgcaggtaggtaatactagttagtaaataaagtgaaaactattttttttttttgagacagggtgttgctttgtcacccagatgggagtgcagtggcatgaacacagctcactgcagcttcgacttcctgggttcaggagatcctcttgcctcagcctcccatatagctgggaccataagtgtgtgtcactacacctgggtaattttattatttttttgtagagatgaggccttactatgttgcccaggctggtcttgaattcctggactcaagcaatcctcctgcctcagcctcccaaagtgctggaactataggcatgagtcatcacacctagcctgaaaactttttttttttttttaaagaaaaaggtatatgagtatatttaaacataaaaatgaaggaagtcagagtaactgcaaagtttgtttttatttcatttacataggtgatgctgttgacctacagagcctgagttactttcttctttctttcttttcccccccgagacggagtcttgctctgttgcccaggctggagtgcaatggcaccatctcggctcaccgcaacctccacttcccgagtgcaagcaattctcctgcctcagccacccaagcagctgggattataggcacacaccaccactcctggctaattttttatatttttagtagaggcagggtttcaccatgttggtcaggctagtcttgaactcctgacctccttatccacccaccttggcctcccaaagtgctgggattacagacgtgagccaccgtccctggcccaagagttatttttgaaatacaggtgatagatatcccctgagtcatccatatcctttctccctagtctactttgttttcagtggcatatattgctttctagatggctggctaaaattagaaatacagtcttaaggttgtgaaatcatttctctttgcaaaacaaattgccccttctagaattgacctgtgacttgacctcttcagtactgtatttgaagctaattgatagtcttttacagtagttattaacagatagttaaaaggtagtacaggaaggaaggaaatgctctgacactactttctttttctgactcagcttattcttttgtggaactgttaatcatgaatgaaacaaaaccatggggaactgacatatgaagaggcagatcagtggagcagaatagaaaatcaataaattgacccaaataagtaaactcaaggttgcatttcatatcagcatggagtggattattcattaaaagtggctaactcagggggaaaaccttggatctgtcacttcttatatcagataacttccaggtgggtcaaggatttataatttaaaatgaaggctttaaaattgtataagaagatgttgggggggggtgtttaatataatcttagtatacattctaactgctgataattaatttataagaacagcatatccaactggaaatataaaacctatacgataagtaaaatgcagcatgtttaaagtgcatgtataaagtacacttccagggagcaaaggtaaatttaggaaaaccctggcaattagtctcacttccttcatttttatatttaaacacacacaggcctttttaagtttgacacaaaagtcattaaaaagttacaaaattgactacattcttaaaaatgtgcaaataggccgggcgcagtggctcacgcctgtaatcccagcactttgggaggctgaggcgggcgggttacctgaggtcaggagttcaagatcagcctgggcaacacggtgaaaccccgtctctactaaaaatacaaaattagttgggcatggtgacacatgcctgtaatcccagctactcaggaggctgaggcaggagaatccattgaacctgggaggcggaggatgcggtgagccgagatcgtgccattgcagtccagcctgggcaacaagagtaaatctccgtctcaccaaaacaaaaaaaaaaaaaaaaaaaatgtgcgaagaataatatataaaagcaaacactgttcaattgggggaaatatttgcagcaagtataatagaataaacgtatttcttcaatatttaaagacgttctaccaaaaaaaaaaaaaaaaactcaccaaaaaccaataggtggacataattttcaggaaggaacatttacataacttttaaacaaaagatgctcagtgttcagccatactcataacaatatattaaaaccaaaataagaccaaaatgagttactatacttaattttaaatgtaaaagttgtcaaagaaaataaaatttaaaaacacattgcctgggtgcagtggctcacacctatagtcccactttgggaggccgaggtgggaggattgcttgagcccaggagttcaagaatagcctgggcaacatggtgagaccctgtctctacaaaaaatttaaaaattagctggatgtggtggcgtactgaggaggctgagtgggaaggatgacttgaaccctggagtttgaggctgcagtaagctgtgattgttccactgcagtccagcctgggtgacagaaggaaaccccgtctctaaaaaaataaaaaaataaaaaacagtagattaatgaggatatatgtaaatggagactttcatgcatttctaaagggagaaatacacagttgatacaagtaatgtgggtaaagaaatatgtatagtcattgcagtagtatatgtaatactaaaacttttccattactcaggagctcaataaatagactgctggagccataaaagggaatactatgtagctaataaaataaacattgaggcctggtacggtggctgacgcctgtaatcctagcactttgggaggccaaggtgggcagatcacctgaggtcaggagtttgagaccagcctggccagcatgacgagacccctgtctctactgaaagtataaaaattagccaagcgtggtgatgggtgcctgtaatcccagctcttcaggaggctgaggcaggagaatcgcctgaacccaggaggcggaggttgcagtaaaccaagatcgtgccactgcactccagcctggacgacaagagcaggactccatctcataaataaataaataaataaaatattgaggcaacactacatctacagatatggaaaggcatctgagatggatataaaagcaacgctcagactgatagaaggatatctttggctgggcgcggtggctcacgcctgtaatcccagcactttgggaggctgaggcgggtggatcacgaggtcaggcgttcgaaaccagcctgaccaacatggtgaaaccccgtctctactacaaatacaaaaattagccaggcatggtggcatgtgcctgtaatccaagctactcaggaggctgagacaggagaatcgcatgaacccggcaggcacaggttgcagtgagccaagatcatgccactgcactccagcctaggcgacagagcgagactccatctcaaaaaaaaaaaaaaaaaaaaaagaatatttttgcatatgtgtttgcatatgctgaggatatttttggaagcttatctacaaactggcaccacagctgtcactaaggaagggaatattttggtggtgattcgggatggcaggagactcagttttcactgtacactctagttttatgaatttgtatatatacttccatgtagacattcatgtacttaccaatttattcatccaacaaatattaagctctgctgtatgctagtgttggagacacctagctggagcaatgaatgagatgacaaagcccctattgttgtagaacttaacattctgagagtgacaagacagatagtaattatataagtaaatataaatatgtaatgtgtcatatagagataagtactatggtggaaaaataaagtatagtaaattaggaagtgctgatatagggtggtagatatctctgctgccgtgtcaacttagcagacttgaaggaaacgggaataagacgtaggatatctgggggaggattacaggcagaggagacttgaaggacaaaggccatgaagtagaaatttggttggcatgggttgaagaacagcaaagaggtcagtgtgaatgcagaggaatgaagtagggagagattgacaggtgacaaggtcagaaagaggactgcagatgatatagggctttgtaaaccctcattaaggactcaagctaactgagatgtgatgccagttggagagttttgaagaggactcctccatgtagtgggatcactctgactgctgtgtggaggataaatcagttgggtttcctagtataatgtaatccacttatgtaattgcaaattttctagtagcaatattttaatactatgaagggacaggtgaaatttattttaatgatggattttattgaacccaaacatttattaaaacattatacaaacatttactaaaacttaccatctggccaggtgtggtggctcatgcctgtaatcccagcacttagggatgccaaggcacatggatcgcttgaggtcaggagttcaagaccagcctggccaacatggcaaaaccccatctctactaaaaatacaaaaaaattagccaggtgtgctggtgggcacctgtagtcccagctactcgggaggctgaggcaggagaattgcttgaacccaggaggtggaggttgcagtgagctgagatcgcaccactgcactctagcctgggtgacagagtgagactgtcttaaaaaaaaaaaaaaaatgttgctgggcgtggtggttcacgcctgtaatcccagcactttgggaggccaagtgggtggatcacgagatcaggagtttgagaccagcctggccaacatagtgaaaccccatctctacaaaaattagctaggtgtggtggcaggcccctgtaattccagctactcgggaggctgaggcaggagaattgctcgaacccaggagatggaggttgcaatgagctgagatcgcaccactatactccagcctgggtgacagagcaagactccatctctaaggaaaaaataaagaagttgaaaacatcatccaacatgtaatcaatataaacattattagtcagatattttatagtttttttgtgctaagttttcaaaatctgatgcatattttatacctagagcacatctcagtttagatgctacattttcagcaattgaagtgaaatatagccctaccaaaatgataaagttgtgtttaatgggaaaatacttcatttactttagttttaaaatatgttaattaaaattaaattaatttaaaatctaggtctaaccacatttcaagtgctcagtagccacctgtgtctagtgagtgctgtattagagagcatggaaatagagttgtggggtagggtgggcagcagcatggagctgcgtcaggaacctattgcagtaattgaagccaagatgttggccgggaccagagtgttagcagaggagtaggtgagaagtggttgtattcaagctgtattttaaagatccagcttgcgggacttatgaatggattgaatgtgggatatcagagaaagtgaggtctcaacagtaatcttttcagtctgagcagttgaagaatagagttttcatttactgagatgaagaaggagatttctggatggggtgggggcagtccagagttagattttggatatgttaagtttgagatacgtgtaagacatcaaaatggagatatgagaagatagtggatatgtgaatccaaagttcaaggaatagatgtaatctggagaaatatacacgagagtcatcagtgtatttaaagccaggagacttagatgggatcatctcatgaggaagggctcacagacaagagattggaggaccaagctaaggggctcccaaatgtttagagagaaggagccaacaactaaggctgagaaggaatggccagtaggttgggaggagaaccaggagaaaatggtggcttggatatcaagtggagttagtgtttctaaagaaggtgtgattttaaaaagtgtcaagagtagatggaaggttaaagtaaattgaaggccaagaatttcagtggaattgtgggggaaaattgggaagagagggttcaaaagaaactgagatgtggaggaagtggaaacagcaaatgctggcagattttgtgagtagttttgctgtagagggcaacaaattagttggtaactggaggaccgtggatggtcaagaaaagttggttttttgtttttgagatggaagaaattatgcatgtttatgtgctgatgagaatgatctgacagagagggaaagattgtgatgatgcaggagactgacttaaaagggacagtagttgaagggatgttttttagacaagaagatgaactacctgtatttttttttaagggccagttgaggtgacagaagaagaaaagcaagaagatggtgtaatctatagttagcatcttactaattaatatgaactcgcacaagttacatttttccatcattttattaaggtatagtttacatacagtagaatcaccccttttagcctagtgttctgggacttcagcaaacacatacaccaccacagtctaggtcattttaacttatttatgctgggtgtggtggctcatgcctggaatcccagtgctttggcgaggtgggaggatcgcttgagctcaagagtttgagaccagcccgggcaatatactgagaccccctccctacaaaaaataaaaataaaaaaaaatacctgggcatggtggtgcacaccaattgttccagcttactggagagctgaggcaggaggataacttgagccaggagtttgaggctgcagtgagctgtgatagtgccactgctctccaggctgaatgacagagcaagatcctgtctcaaaacaaacaaaccaaacacttttattttgggcaataggttagcttgttctgggaagttggaccctgtatatatgggatataccattgcttctaatttaagagatttataaacccacaaaaaatatgtattatttcttatagtaagttaccagtttggttcttgtaggaggatgtgatgtaggcttgggtgaagaaggtttttcctaaagctaattcaagcaaaaaaaaatttttttcagaaagtctgtgccatgaaaaaaaagttatattagcatcatatagacaaaccacaattatgtaactggatattttttttcattttagttggacatattgaaggtgattaattgtaactggaaccccctaaagaattatagtggaaaaaaaaatatgtggtgtctagacaattctagtggaagacaaaaatatttcagttactcaataaattgaaataatatttgagccaaaatcttgtgcctgtgccaagatctggcataagtttttagttctgtttcttagccacttctctaggtgattgatctcatttagttaattgagggaattgccagaaccaaaatccaggcaacattaaaaatcgttgtttttaatacactgagtcccaggaatcagtttctggacagtgtcgagctcctattgccaaggagctatgaatttaggccatgcacttaggaaaaactgtttagactttacttctctcagcctggctggaattttggttgactgaatctttataatctatttaaaggtgtccttttgagtcaaaaacatagctgatttgatggaagtaagttttgtctaaacatgtggcttttatttctgggtattacaactattggaattctagtggaatccttttaactacttttaaagcaaatttcatttttactacttataagaatcatttctagatcttcaacttgttttagtagctatggctgattcattctctctctctttttcagaatgacagtaacttttatttttatttatttatttatttttaagatggagtctcgctctgtcacccaggctggagtgcaagtggtgcgatcttagctcatggcaacctccgcctcccgggttcaagtgattctcctgcctcagcctcctaagtagctgggattacaaatgcgtgccaccatacctggctaatttttgtatttttagtagagacggggtttcaccatgttgatcaggctggtctcaaactcctggcctcgtgatcctcctgcctcggcctcccaaagtgctgggattacaagcgtgagccaccgcgcctggcaacagtagcttttaaaattataaaacaagtgcatgcatcttcataaaatgtttttttaaataataaaatgtataaaacaaatgcttcctccatgctactcatcagtgctaaccactattaaatttgtagtttctcttggcagactttttatgaatatataaaaatatatgaaaaatatatgtatatgtagtttttcaggtaaatgtaatcgtgttctcttataataggacatttttccatggcaatacgtgcttgtatttttagggactatataatattccatcatacacatgtaccaaaagatgtttaaacacttaaattgtttgtaggtctttgcttttctccacaatgctccaatcccaggacatgtagaattgttcttatctgcctagtttattagagtatatttccaccagaggaattgctagtcagagggtatgcccattgtcaatcatgatgtcacagaagccagacattagcttgccacttaggcaacagagggtatttgttgaaatggaaaaaagctttaaaatgtgtagaattataggccgagcatggtggctcacgcctatgatcccagcactttgggaggccgaggcaggcaggtcatgaagtcaggagatcgagaccgtcctggctaacacagtgaaaccccgtctctactaaaaatacaaaaaattagccgggtgtggtggtgggcaactgtagtcccagctacttgggaggctgaggcaggagaatggcatgaacccgggaggcagagcttgcagtgagccaagctcacaccactgcactccagcctgggtgacagagcgagactctgtctcaaaaaaaaaaaaaaagaaagaaagaaagaaaaaaaagtgtagaattatttttaaagcatttatgtagaattttgtattctaacaagggtcagtttattcctctctaattaaaatcaacacattgtcagaacctccagaaaggctctacagtattcccttcactaacaaagtatgttagtcccttgagtgcagggaacagtgttacttgttcactgaatatcctaatgcttagccttagttcttgacatagaatagtaggtgccaagtcagtacttttaaaatgtgcctgttttgccacatccttaccaactcagtgcattatcagacttgttaattttttatcagtctagtatgcaaaaaggtttcctttttaaaaaagtttgttgttttttttttttccttgttttcctcacttcttttttttttttctttttttttttattatactttaagttttagggtacatgtgcaccttgtgcaggttagttacatatgtatacatgtgccatgctggtgcgctgcacccactaactcgtcatctagcattaggtatatctcccaatgctatccctcccccctccccccaccccaccacagtccccagagtatgatattccccttcctgtgtccatgtgatctcaatattcaattcccacctatgagtgagaatatgcggtgtttggttttttgttcttgcgatagtttactgagaatgatgatttccaatttcatccatgtccctacaaaggacatgaactcatcattttttatggctgcatagtattccatggtgtatatgtgccacattttcttaatccagtctatcattgttggacatttgggttggttccaagtctttgctattgtgaataatgccgcaataaacatacgtgtgcatgtgtctttatagcagcatgatttatagtcctttgggtatatacccagtaatgggatggctgggtcaaatggtatttctagttctagatccctgaggaatcgccacactgacttccacaatggttgaaccagtttacagtcccaccaacagtgtaaaagtgttcctatttctccacatcctctccagcacctgttgtttcctgactttttaatgattgccattctaactggtgtgagatggtatctcatagtggttttgatttgcatttctctgatggccagtgatgatgagcattttttcatgtgttttttggctgcataaatgtcttcttttgagaagtgtctgttcatgtccttcacccactttttgatggggttgtttgtttttttcttgtaaatttgtttgagttcattgtagattctggatattagccctttgtcagacgagtaggttgcgaaaattttctcccattttgtaggttgcctgttcactctgatggtaggtttttttttttttttttttttgagacagagtcttgctctgtcacccaggctggagttcattagcgcgatcttggctcactgcaacctctgcctcccgggttcaagcgattctcctgcctcagccccccaagtagctgggattacaggcacacgccaccatgcccagctgatttttgtatttttagtagagacggaatttcaccatgttggccaagctggtgtcgaactcttgacctcgtgatccacccaccttggcctcccaaagtgctgggattacaggtgtgagccactgcgcccggcccaaaagttagttttttaattattaaaatcaagcgtcttttcatgtgatgactggcatctgtatttcttcatataccggatttatttttatatgggagtattgcctttttcttattgatttataagagtaggttaaataaacaaaaatttttaagaatggtaatcaaatgacctgtgccttgcacatttgtttaccagcctgacatttgtcttctaagtatattaagtcttgctatagagaaagttttgatttttaaagtagtcagatccatcagtcttttcacttaagatatctgaattctgtaacatggtgaggagggcctttctcattccaggattataaaaatattattatattttttcttctaatacttctataaagttttaatttttatgtttcaatatttgatttttctgaaatttatttttgttcagtgtgaaaaattgaaatctaaaatttcttttatccaaatggatagtctcttgtctcaacattattggtttgaaatactacctttatcatgtacaaaattttcatgtataggtgaaattatttctggactgtaatttttgttttgtcaatttctttttctttttctttctttttttttttttttgagacagagtcttgctctgttgttgcccaggctggagtgcagtggcgctatcttggctgtctgcaacctccacctcctcggttcaagattctcatgcctcagcctcccaagtagctgggattacaggtgtgtaccaccatgcccggctaatttttgtatttttagtagagacagggtttcgccatgttggccaggctggtttcgaactcctgacctcaggtgatctgccctgcttggcttcccaaaatgctgggattacaggcatgagccaccgtgcccggccacattttgttttaagaaaatcagttgcacaattacaaggtagggaaactttatttgataataccagttcagtcatgttaaaagcaaaataaacaaaggacctgctgtttaaattgatttcaaactcaggatgagttatgatcttggttggaaaaataataagggttgtaattaaactgtattgcaggaagtttggcatccagattaggaaaggtaatactttcaatctttgctgatcaaacagtttttatcatttgtgcacctgttttgtgccaaggactaaactagatgctgggatacaaagctgagagacgtagcccatttataatagaattgcaagtcagtaataacaggttttatgagaagccagaagaggaatatccagaatttagaccacaggggatgggacagcttttaacaagaaggagttgcatagagcagaggctttggaggtggagctgtcggcttcactactatgggaccttgtatttaatctcaatctcaatttcttaatgtacaaaatagggtcactaataatctatttcacactgttgtctgtcctaagcatcgatgaggaaaaaatatacacacatacatacacacacataaaatgtatatatatgtgtatacttttttcctcattgatgcttaggacaacagtgtgtatgtgtgcatatatatgtgtgtgtatatatatatacactttatatgcgtatgtatatatgtacatacgtatatgtatgtatatgtaggaaacctctgaaacactctggggacataataattgctcagaaaatggtgtggaatccatccattttgaagtgctagtaggtaggagttggctcagtagagaagggccttctcagcagaaggaaaggtgtataacaaagccaggtggttgaattggggcctctctggaaatgtaaagtatttaatctggttggattgtggggtacatgtggagggagcagctgaagatgaaactgtgaaaggaggcaggggtgggatctccactgcgagcttttgtgccatgttgaggagtctgagaggcatttaggaagtgttgtggagtccttaaaaaccattattaggggagtgttcagaacagttttgccagttgaaagactggtttgttatagatgcatggagtggctaggaaagctgttagaggtaggatatctagtaagagccgtggtgctcagccctggctgcacattggaactgtctggagaacatttaatggcccgatgcccaggttcaccccagatcaattatatcagcagctctaggattggaacctaggaattggtattgttcattgttccccaggtgattccaccggacagccagtattgtgaatcactgagttagagggtaactgtattcaaaccagatatgaagttgcaaattaaacgagtgccagcagcataaagcaggggtccccaactggccaccaggtaccagtccgtggcctgttaggagctgggccacacagcaggaggtgagtggcaggcaggcaagccagtgagtgagcaaagcttcatctgtatttgcagccactccccatcactcgcatcactgcctgagctccgcctcctgtcagatcagcagcggcattagattatcataggagcacaaaccctattgtgaactgtgcatgtgagggatctaggttgcacactccttatgagaatctaatgcctgatgaactgtcactatctcccatcactcccagatgggactctctagtagcaggaaaacaagcccaaggctcccactgattccacattgtgatgatttgtataactaattcattatatactacagtgtaataataatagaaataaagtgcacaataaatgtaatattctggaatcattgcaaaaccatacctcccttcacccctgtctgtggaaaaactgtcttccacgaaaccagttcctggtgctaaaacggttggggaccactagcataaaggaactagaataaggaaataacaaatatggtggtcagttgaatgaggaggagatggagtgaagatctgaagatcatttctagattagatcactgggtggattcgatgatcgtataagagggctcagtcatatatcgagtgagaacaggaaggagaagcagatttgggtactaggacttgctgagtgggtacaagaaatagaatttgatttttatatgtggaattagggggaaaattaactctataatgccaaatgggcagaaaaactgaagggaaagggccaatggaatagttgaaaattccggagacagagtagataattgatgggtgagatccctgaagaggcagaaagtgcagagcagagatgaaagaagtcatttagggccaggcgtggtggctcacgcctgtaatccagaactttgggaggctgaggcaggcgattacccaaggtcaggagttccagatcagcctggccaacatggtgaaaccccatctttactaaaacacaaaaattagccaggcatgatggcaggtgcctggagttccagctacccaggaggctgagacgagagaaccacttgaacctgggaagcggaggttgcagtgagccaagattgtgccactgaactccagcctgggtgacagagcaagactctcaaaaaaaaagaaaaagaaaaagaagtcatttaggctgggtgccgtggctcaagcctttaatcccagcactttgggaggctaagggggagaactgcttgaagcccaggagtttgagaccaggctgggcaacatggcaagaccccatctctacaaaataaaaaagttagccaggtgtggtgatgcatgcctgtggtgtcagccactttggaggctgaggtgggaggatcacttaagccctggagtttgagcctgtagtgacctgtgattgcatcactgtcctctagcctgggtgtcagagcgagacccccatctcaaaaaaaaaaaaaaaatagtaagggaattaaagagtgtggtcaagttttggaagatgggggtcatctgaggaaggcaactaagaaggaaatgtctttgttgtcctacccttaaatgttgcttgtccccagggttttagtgttggccttctttcacatacttcatggatgatctcctttgatatattttgttacactgttaacttctgagagaaacattgataagctgaagtttgttgggggaattaagtagttgatgttatagttcagaaaataataggttggcttttccttttggggggaattttcttggtagcagtttgctatgttaatttgaaatttaaaatactgaaatcacttgaaaacacggtacagatcccactgtttctagtattaataactagttagcaccatgttttttctctagttataaaaccctaaagcattaccaatttgacagtttgaaaatatgttagcttttagtctcagtgttttatactataaagaaatctgaatagttattttacttttcatgttatgtttcatcatcaagtatattattctgttatgtctattaaagatctctttctcaattctgatataaactgtgatttgcgttacatattctctaaaaattttttcttctaaaagactaactgaaagtttcgtagttaattgtcagataattggaactatttattttatagagtttcagtaaaatataaataagattagttatgcagcaaaattaattgtattccttacaacaaagcagtcattagtatgacttttcagtaaggtgtattttgttcataatatgcttcctaagataattataaattacctcaacataatgaattaggaccatgggtgtgtatatagctagaaaatggccttggtatggcagaatactaacttaatgttttgatatcatttcaggcaacatttcatttgttgcatttccagtttccaataccaactcacctacaaagattttaccaaaaaccttaggaccaataaatgtgaatgttggaccccaaatggtaagaaaattatcaaatcttagaattgaaactttgtttagccaagactaatttaaagaataattgcattaaatatatttgatcagatattccagttaaaccaggcgcggtaggtggctcactcctgtaatcccaacactttgggaggccgaggcaggtggatcacttgagcccaggagttcaagaccagcctgggcaacatggtgaaaccctgtctctacaaaaaacagctgggcactgtggcgcatgcctgaagtcccagctacttggaggactgaggcgggaggattgcttgagcccaagaggtcaaggccacagtgagccgtgtttgcaccactgcactcctgcctgggtgataaagcaagaccctgtctcaaaaagaaaaagaaaaaattatagttaatttcagttatctgagtcacttttaaaaaacgttctgtttttatctgaatgtatctggtcaagttttgagcttgagaaacattgtgtgctctttgatatttaattttcacatatttgaatctgtggattctggatgtgtagtattaagtcttttcctctttatgtgaggtttctcttgtattgtttaaattgatttgaaatgtgttatgctttatgtcttcctgcttttttctttttcttataaaataacctttactactctaaactatgtattctcacataaatggaatctgtgacccaacagttaatttacatctggagttattaatttaaaactcctttcattaaggacttttggggaaaaaacaatataccaatttattttaatctgtagcagtagaaataatgaatgaaaaatggaaaacaactgtttctctaaagacattcattaattatgctagagcatgaagtgtgtagcactttcagaagacttatttataagcaaggttgcattccactactctgaaactatgtctaaatggcctcacccaccattagtaaaagtactcaaacatttaagcaataactcttcattgccggtgttttcatcttttcatctatagagcaataaggataaattttacccataatgtacaacagcactgtggactatgttaaatgcaaagttatttagacaaagatatcttttaacatacctaatggtttcagaaagtctctaagacttcaggacacattctagacatgatattttccttggttagttgaggactgtttatcatctgcagaaatcaagctaaagatacaacacaatttactgtaactatgtgaagaatgtagtctagctccaaacctcatagagatttaagctcaaataagagccctcatttcaaggtagctcaggttatattttcagacatttgctaagcatttgcccctcctcagccactactataggtgcaaatgagataaagcacctgacttaaaaatctgcattttgaaatgtgattatataagcaccaaaattaaacatactcaaatttttatgagtcttgcccttacagtactcttctgttttgagagattattttctattattttttgtttaatgctgctataccccaatttgaatttctcctttggaagcatgtataatttttctcccattgtcagtttgaactaatgtgcattttggcccttacacagtccagttctgttaagtagtgatgtgtgctactaactcagttactgtaaatctcaggatcagcaaaacaaaggtcacaagaaggagaggcgatttggaactctaccttcaactgggccatcccaagtacttaatttgtccccctacttctgaggtccttttttcagttctgagttcttgggcaggaatcagaattttgtttttggtttcctaattgttgtaagattccattgctgtctcttgaatgtgtccctccaaaattcatgttgaagcttaatccctattgtggtgctattaagggatagagcctttggggaagtgattaagctatgagggcttcattctcattgaggggattagtgaccttataaaagaagttgaggctgggtgtggtgtctcacgcctgtaatcccagcactttgggaggccatggtgggcgggtcatgagatcaagagactgagaccatcctggtcaacatggtgaaacccatctctactaaaaatacaaaaattgccgggtgtggtggctcatgtctgtaatcccagcactttgggaggccaaggtgggtggatcacgaggtcaggagatcgagaccatcctggctaacacagtgaaaccccatgtctactaaaatacaaaaaattagccaagcatggtgacacacatgtagtcccagatactcgggaggctgaggcaggagaattgcttgaacccgggaggaagaagttgtagtgagcagagatcgcggcactgtactccagcctgggtgacagagcaagactccatctaaaaaaaaaaaaaagttgaagggagctctttgcccccttctgccccacttcatgtagtgaagacactacaagaaggtaccatctatgaagcagagagtgagccttctgaatttgctggtgtcttgatcctggacttcccagccaccagaactataagaaatacatttctatcatttataaattacctatgctaaggtattttgttatagcagactaagacaaaaattagtgccaagaactggggtgtggccataacaaacacctaaaactgtagaagtggctttggaactggataatgggcagaggctggaagagttcagaggaacaggctggaaaaagcctcttgagatgaatggaccattaagggtgattctggtgaggaatcagaaaaggagagctatagagaaagcctcacttttcttagagattacctccgtggtcatgaacagaatgttggcacaaatatggatggtaaaggccattataatgaggtatcagataggagtgagggacatgttattggaaactggaggaaaagccatccttgttacagagtagcaaaaggctgggcccagtggctcattcctgtaatcccaacattttgtgaggccaaggcagaaggatttcctgagcccaggagttcaagaccagcctgagcaacatagtgagacctcatctttatcaaaaaaaaaaaaaaaaaaaaacactaaaaataaaaaattagctaggccgggtgcagtggcttatacctgtaatcccagcactttgggaggccaaggctggcagatcacttgaggtcaggagttcgagaacagcctggcccacatggtgaaaccctgtctctactaaaaatacaaaaattagccggacatggtggcgggtgcctgtaatcccagctacttgggaggctgaggcaggaagatcactcgaatctgggaggctgaggttgcagtgagcagagattgcaccactgcactccagcctgggcaacagagcgagactttgtctcagacaaaaaaaaaaaaaaaaaaccaggcatggtggcacctagccactcaggagactaaggagagaggatcacttgggcccaagagtccaaggctgtagtgaccctgacagagtaagactctatctcaaaaaaataaaagaaccaaacaacaaccaaaaaagtggcaagggacttcactgaattgttttcctgttttaatgttttgtggaaggaggaacttaggagccgtgaaattggatatttggtcaaagaaatctctaagcaaagtgtttagggatcaacatggcttctcttggctgtttatagtaaaatgtgagaagagagaaatgaattaaagatataatttatcatcagaagtgaagatttgggaaattctcagcttggccatgtaaagaataaaaaagcatgttttggagagaacaccaaaagagtggcctagtcaccttttgataaggagattagcgtgcatgggtggaagcttggtgttgttcatcaaaacaatggaagaataaacccatagcatttcagtgattaccggtgctgctcctcccatcacaggcccagagtgccaaggcatgggggacagaactatcaaaagaggggcttcaggcgctaatgaaaccctggcaatcccttcctggcactgtgtcaagtctgctccccgaattttggcacagtgctccttagccattccaggtgtggctccagtaggcccaagtatagtggctgctcctctagagggcacaggtggtgaaccttggcagtgtctgagtgatgccatctccagtgggtgcagagtgtacaagctgcggggtatgataacttccacctagatttcaaaagatgccctggagagccttagcagatcctggcagagaattgctacagaggtgaggccaccattgggaaccctcaccagggcaaagcttggtggagctgaggtgcgcggggttgctccctgaggccctagtctagtagagcttccagcatgcaactccagcctgggagagccacatgcagaagactcaaactctaacccaggagaactgcagcatgggctgcccccaataaagtcatgggggtgggggcccctggtaccctgggggcccaactcctgctccagtgtgtccagaaggcaggatatcaagtcgaagattattctgaagccttaaaagttaatgtttgccctgttgggttttgtattggttgggacctattatccctttcttcttttctattttctcccttttggaatgggaatgcatgttctgtgcctgtcccatcattgcattttggaaacaggttggatttcacagactcacagctggaggggaatttgcctcaggatgaattgcacctttgagtcttacccatatctgattttgggaaggagttaagacttgtgagactattggaatgaaatgaatgtattttgcctgtgaaatagacatgaattttagagggccaggaactgaatgctgtggtttgaatgggttcctccaaaaattcatgttgaaacctaatccctactgtggtggtattaagaggcggggccttttgggaagtgatgaagtcatgagggcttcacccttatgagtggaattagtgcccttataaaagaggttgaagggagcaccctggaccctttctgctattaggatgcaaccagaaggcatcatctttgaagcagagaataaaccctcaccaggcactgaatctgccggcactttcattttggacctctcagcaacctccagaacagtgagcaataaatttctgtggtttgtaaattacccagttttgtactccttgcagaagactttaaagaaaattaattaattacccagtctaaggtggtttgttatggtagcctgaatggactaagacacccagttacagccatttatcgcttctcctctaactccctcatccatgatttttaaaaaagtttttgtttagttaaagaattcttggattaggctgggcgtggtggctcacgcctgtaatcccagcactttgggaggctcaggcaggcagatcacgaggtcaggagatcgagaccatcctggctaacaaggtgaaaccccgtctctactaaaagtacaaaaaattagccgggcgtggtggcaggcgcctgtagtcccagctactcaggaggctgaggcaggagaatggcatgaacccgggaggcggagcttgcagtgagctgagatcacgccactgcactccagcctaggcaacagagccagactccgtctcaaaaaaaaaaaaaaaaggaattcttgcattacaaactcacccatttgcttcttagccttctttttgtgcttgccctttgaactttacatgtcttttggaagccaaatcttaatggtagatagaaatttcaaaaggccccatgaaaagttttgtgtggttatggaaactagtttagcagtacctattttagtttgagatacttgcccttttcttacaggctgtcttatggttatatgttatagatcttaagattatttatacagttgacctttgaccaatgcaagggataagggcacagcccctgtgcagtcacaaatccatgggtagcttttgactcccccaaaatgtaactattaataccttattattgactagaagccttactataacataaataatcaaataacacattttatgttatattaatgttatttcatatgttaatatgtattgtatactgtattcttacaataaagtaacctagggaaaaatattacaaagaaaatcattaggaaaatacatttataattcattaaatggaagtggattatcataaaagtcttcatcctcgacgtcttcacgttgagcaggctgcggaggagaaagagggaggagttggtctggctgtctcaagggtggcagaagtggaagaaaatccatgtataagtggacctgcccagttcaagcccatgttgttcaagggtcaactgtataagataatctaatggctgtcttattttagaagagtaaaaactgcatgcttcttatagtgaaaaccaaaattccatcaaatagtgaaatctcttaatataccactttataattttgtaattttttttccctttagaatacatatgctgtcttggctttttttaactgtagatggcagtagcacataaaatatgttgattgagggcaggaaaatgttcagagtaatgttcaattgctatgtgattttcccagagtaactaattctattgtcagagaaaccacatgataacatttaagttaaggatgtctggatttttggtaggaggactctgaaatttaaaactccattttccttagcatatcaagtgaatattaaaagtatatttttacctccaacttcagtacttcaaattttttttcttttttgacagagtctcgctctgccacctaggctggagagtgtagtggcacgatctcagctcactgcagcctccgcttcccaggttcaagtgattcttctgcctcagcctcctgagtagctgggattaccggcgtgcaccacaacacccagctgattttttttgtatttttggtagatatggggtttcaccatgttggccaggctggtctcgaactccctacctcaaatgggagcctacctcacctgccttaggctcccaaagtgcggggattataggagtgagccactgtgcctggcctgggatttcaaaattaaggttcagggttagaaagcatgaccggctcatcaccctataaaccaattttcttatattctgtggctgttcaagtcttaccgactttccttctgttttatttcttacgtttcactctcattatcctagtttaggaacttactgtatctcacatactcttaggccttatctttcctattcaggtgcgtcatctctctaatttgttcatgtaggaaatgtttattaaggaattgctatgtaccaggccctgtgctaagagaaaggagcagagtgttgctaatcactctccgatcagccgcagctaacaatctgacaatgagggagggaaaaaaagaaaatgtaaactagaattcactttcaaagtcattttcataaagatagccagtttttctctatgtcctctttcccttccttctctctttttttcctttctttctcttttttttttttttttttttgagatggagtctcactctgtcgcccaggctggagtgcagtggcatgatctctgcttactgtaacctctgcctcctgggttcaagtgattctcctgcctcagccttccaggtagctgagattataggtgcccacccccacgcccagctaatttttgtatttttaggagagttagggtttcaccatattggccaggctgatcttgaactcctggcctcaaatgatccgcctgcctttgcctctcaaagtgctaggattacaggcatgagccaccatgcccagctccttttttttttctacaaagtcctgtaaatcagcaaaaccaagcatgtaggctgctaataccatatagaaatactgcagtagtaatacaatctgtttcaagggtaaattggaatgcttagaatagctttgtagacactgctgttcaaggaatagggttgaccagaggctaatcaaataactcacatttttctttataagttgtccatccaaggtcagcatgatagagaatgtgatgtagtgattggtggaaactatgctgtatttttttagtggattttatataaaccttttagcatatcaataaatgaagttactttttcccctattattttaaaagttgagtattttatcccagttagtaaatatttattgtacctttcctatgagcatcccctaccactgtgttaaaccctgcaaaggacatagtttagcaaggtactcgccacccctaaagatcctgcactgaaatgggggatgcactgaaagtggggatgtgggaccagatgtgtggagtgggaagtgcaagcatacttggaatgcaaggcagaatttgatgagaggtacagacacattgtctgtttttatgttttctcatgaggcaaacttctgagtgccttatttaatacccttggtgtattgtacataatcagaactctccagacatctgtcagtattattaacttttgtttttatttttttaaactatggaatgaacggattgaaactatttcataaacatttctaggtgctaacatcttcctagccccaagctaacatagtcaaacataaacagactctaactaaggtcttaaatacttggtaaatgaataaatgttgactagactttaataactaggtctgaactatttttatgcttcagaggttattgtttgactctttccttcaaatgcaaataaagagcttgaaatgcttattaatccttcccttcagttatgtatggagcaagttagcaatgaacttaatgattcaccctggctgcagaaacatgtttcatttggtcagggagataaaaattaattagcattttgtcttgcataaggcagtagaaatagaactatttctcttgtttgaggacttattaacaattacttgtagtccctgtagatatttttcattctcagttgggacttaaaacttactatcatgaacactttcaaaactttacaaaaatagaactatatacccagcagttgcttcaacaattatccacataggggccaatcatgtttcattaatatccccattcaccggagcatgcctcttcccctttttttacatgaaaatacttctaaagctattactaggctgctagtttttttgtattaattattataaatgtctttgggaaaaacatgttttgttttgtaaccagtgaaaattttaagacctggtaacacatataaggtacctttctaaaaaagtctttaggggttccattaatcccctttctggagtctagccttaggaaatagaaattaagggcaaggtctttgtacaaaaatgtttatcacagcattctttataatagtgaataattaaaaatgcatatatatctaatagagaataataaatccacatggtagaatgttttatggtctttaaactatcttcaaagagtatttaataacatgaatactcttttttttttttttttttttttggaaatggagttttgctctttttgcccaggctggagtgcagtggcgtgatctcaactcactgcaacttccaccttccaggttcaagcgattctcctgcctcagcctcccatgtagctgggattacaggcgcacagcaccatacctggctaattttatatttttaatagagataggttttcaccatgttggccaggctggtcttgaactcgtgacctcaggtgatcctcccacctcggcctcccaaatgctgggtttacaggcacgagccaccgctcctggtccaatactcttttaaaaaaggataaaattgcatctatataataatccaagctggatagtatctttgtgtatactgtatgatggactgtggaagtgtgatttgctgttgccctggttctagtaaatcaagctgtactgcaattcatttcctcagtttcaaagaaagcttttcatttttctgatttttaaagcattatcagttctctacttaatccttccaaattgccatttatttgctgaaacctgcattgtgacctcatgtcagtattcaggatacttgtgctttaagatcctaggatataagtaaatcaaaggcattgcttatatttttagatgactgacattaagtgccttttaggcagcaaggtttcctcatatgtaggttagcaatcaatgttattttctgcctgtaggcttttcttaataattaagaatattatattctttgttcctaactttacagattataagcacaccacagagactaaccagttcaggaagtgttctgattgggagtccatatacccctgcaccagcaatggttactcagacacacatagcagaagctactggctgggtccctgggtaagagtgttgcaagttactatttttaaaaccttaaaaaaagtttagacatttttttcttactatcttgtcttctgttcttgttttagtttagttcttaaaaacaaatgtttttcctttaaaatcacctattttatttcactttatatcttagatataaataatctctggaataactatttttaaacagaaaaaaacagtgcaataactcataactaaaccctgtgactttttaaactctggaataggactacttttattattataatatttaactgctttggagatataaaaactatatttttatatatttttaactcacacagaaaaggagttaaatattaagtgttggctatactcagaatttcccctatgaattacttccataaagaccagaaaagggtaggaaaagaggccagataaattttttattaaatttcctcttctttttaaacgctgaacaattgaatcaatatcccttctgttactaatttgtcacttttagtacaaacttctatatgtttcatctttgcatgtaaaatacttatacctttctccactctttatcattttagtacctcatacttccataaaagaaaaataagtaagataaattactcaaaacctcattttgttaccttagacgttttgttactttagaagttatttacatggtggaatactgcattggtgattctgtcatatgtgagtttgagcaagcagatggtaagtcttagttaagtaagaatctccttgcttcaaggatattaagtgaattaataatcctggcaaagtgctttaatatgcatacatattaatatacataaatacatgcctacacacatgtacaaacacaaatacattaaagacagaagagttttgtatatgcatacttttccattatcaaatgagctgaaatgacagaattacctggaatcctatgggtgttattcaatccttatgaacattcttatgtagatcaaaggttaccctggatttctctatagccttgaaagattataacgtgaaagccaagcctgtgccagcagtgctggcccactttggaaatgaccagggtctggatgttttcagccccatttgtgctttatattggaggtggcaggattgtctggtgtttttatagtcagtatttcgcagagtgaagaaaatttttctctatcttgtttgcaagtctgcagtgttttcctctctagctagtcattgagctcttttcaacttatgattattaagttgtgataccttgttcacatgataaaattaagatttattttatgtacctatcttttgtatttgctagttttagtctttgaatatattcagtgtataattttagacaagttataataaagtattaatgaaattaaattgtatttaagtatgtattgtttttatgctatcttttttcctttttagtgatagaaaacgggctagaaaatttatagactctgatttttcagaaaggtgagtataagtctaactattttgtttggaagatttggctatatagagaggctgttggcattgccactgctctggtttaatgcgatgtttttcttcatgtaactttaacttctttcagttcttgccattatttcattctgcattgagtgccccagttcactcatagtatctgtatggtttcagtagaaattaccctgtgagcagattgactattggtagtatgtcctttagtctctcctctctttccatctggtaaatgaagagttctatcaaagtgaatactccacattaccctaacatgcccaaagtttaacaattttttcttttttcttttttttgagatgaagtcttgctctgtcacccaggctggagtgcagtggcgttatcttggctcactgcaacctctgcctcccgggttcaagcaattctcctgcctcagcctcccaaagtgctgggattacaggcatgagccaccacacccggctaagtttttcttaaaacatttataaatcataacaaacttgcttctttcttaagcaatatgttgggcataaggaaagttcatgttatcttagaatattaggacagtggcttctccattctggctgtgcatcagaatcacttgtagtctgttaagtaaaaaataaatgcctgccatgtcagaaactcctacattttctaatttgctatctctgatttgctgtgccctgagaaattagatggccaaatatgttagaattcagtctaaaatgaaagtgactaggttctgagtgagaaccatgggaatatgtataaaggatgtgtgttttcttgccctgacactagtgctgtttcagttccttggtggcttttgttgtttgcttcttggtgctaatcgttttcaacagatacaatcacttctgaggagctgctgtatcatagaaatgaaatgttctttactctctaacagaaagtcctctttccaactcaaactggtctttactggtgtttatccttcgaaagggcaacagaacaagttcttgcagaggtatttagcaatgtttaaggccttaaaatggaactatttgtcagttatgattggtggcacctctgcactgcaaacagtacaaaaaccaagattctctttattctcctttgtaagtaagaattctaaagatctataagtgagaacacataaaagtgttaggttaaatttatagtgtagccattggttcaactttctctttctacatttggttcagtggctttttttcctagcattttttttttatcattttttaaaaagttttgaatataacttttctgtaatgtatccccaccacccgtctgtcaaaccacgaagattgctacatgtatttttctttattccttgttctaaataagatttagcacagtggtgtttcatttttttctttatgctttttttttcttctttctttctttccttccttccttccttctttttctttctttcttttctttctttttttttttttttgagatggagtcttcctctgtctcccaagctggagtgcaatggcttgatctcagctcactgcaacctccaccttctgggttcaagcgattctcctgtcttagcctccagagtagctgggattacagacatgcaccaccatgcccagcaggtttttgtctttgtgtagaaacagggtttcaccatgttggccaggctagtctcaaactgctgacctcaagtgatcctcctgccttggcctcccaaattgctgggattacaggcatgatccaccacgcccagcctcttttgtttttaagacagggtgtcactctgttgcccaggctggagtgcagtagcgcaatcttggctcactgcatcctctgcctcccaggctcaagtgattctcctgcctcagcctcccaagtagctgggactacaggcgtgtgcccgctaatttttgtatttgtagtagagatggggtttcaccatgtggccaggctggtctttaactcctcacctcaagtgatccacccaccttggcctcccaaagtgctgagattataggcatgagccaccacacctggccttttttttattttttacttttttgctaattaggtcaagggttaattttataaacaagactgaaatattttgttgatttaaatgttctggttgactctctttttaacaagaagtgaaacttttactatatattttatataactccttattaaaatgaaatacatttattgcaatttatacttgagatacaatactatacatttaagttgtatattacttttgtaaaccataaaaaaatttattgggaaaatgtcaaaagatggtttgtagattctagttacgtgcctggaaagaaagaaaaatacttttttattatttgggtgtaattcttttgaaacttcaaaggaaataatcaataaaatgtaacatgcttttcaaaccatagtatattagtggggtttgtttgtttgtttgttttttgagatggagtctcaccctgttgcccaggctggagtgcagtggtgtgatctcggctcgctgcaacttacgcttcctgggctcaagtgattctcctgcttcagcctcccaagtagctgggattacaggcgtgtgccaccatgcccggctaattttttgtattttcagtagagacggggtttcaccgtgttagcccaggatggttttgatctcctgaccttgcaatctgcccgcctcagcctcccaaagaattgggattacaggcatgagccaccgtgcccagcccagtccatcttaaattggaagctctctatttaaatcttaaatatataaggtttatacatttttttagaacctgagctctttcaaacaccaagaccctctctttccaaataacgtcaaaatttggccacaggatgtaaacactctataagttcataaaccaaacaaagaaaccaggaggaagcattctttatcaaaggaactaaattaagaagctaaaacctaaataagaaaataaaaccacagactgggcacggtggctcacacctgtaatctcagcactttgagaggctgaggttttttatggtgaaacttgtctctactaaaaatacaaaaattagttgggcatggtggtgggtgcctgtaatcccagctactcaggaggctgaggcaagagaatcgcttgaacccgggaggcagaggctgcagtgagccaagatcacaccactgcactccattttgggcaacagggtgagactccagcctggtcaacacagcgggactccgtctcatgtttactccctacctccctcatgcccactgctaagatcttattgaaattttagtataaaaaataattaaagaggctgggcatggtggctcacgcctgtaatcccagtactttgggaggccagggtggccatatcacttgaggtcaggagttcaagaccagcctggccaacctggtgaaaccctgtctctactgaaaatacaaaaattagtcaagcgtggtggcacatgcctgtaatcccagctattcgggaggctgaggcgcaagaattgcttgaacccaggaggcagaggttgcagtgagccgagttcgtgccactgcactccagccccggtgaccgagggagactctgtctcaataataataataataataattattattattattaaagtaaatctgtaaaagtgctgtaaaaaatgataggggtatagattttccaactagaaaatgaaagctagtgttattataatgaaaagtgaaagtagagaaatctacatcgcatattgcgtggaagaagtcagcatcagaaatggtagccattgtaccctacattgtcacagagaggctccaggcttaaagttgacctgcgtagaaagcaagaatgaattgttggaggaagtaaggagggcgattgaataaagacttttagcagctgggccagctgaaccatcccaacccttcaaatccccttgtacctcttatcccacctccatacacagagcagttgccccaaaaacatttctcccctagggctgaaacttggagaactgatcccagggaaacaactgcctgcttcagctggtttaagaattttagtatgccccagaacaggttttcctcatactggcatttgtatttgtgggaagagagagagaccagactggctgcctgcttgtctgcttagcagcaaatacaacctgaagttaagcttgttgccagcatggcccactcacatccagagaagttgtggttagccctccacaagtgggggaaccttcttaggaaaacaagcgtgcatacaagaagctcatgtaaactctatatattgaaaacttgaatccaacattcgtgaacatgaaagaacaggacatttttggaaaactatgatgaaagaaaaggaacaagatgaataaacaaaagttatgacccaagaggatgtaagataaaaaagaacaataaaataaagttgtaattatcaccctttgagaggtctgaaggttcctgagaagagataatattcatgaaagaaaaagaagatcctatggaaaagaagcaaagaagaaaaacattctatgaagtttaaaacatgattgccagccgggcgtgttggctcaggcctgtaatcccagcactttgggaggctgaggcaggcggatcagttcgagaccatcctggcccacatggtgaaaccctgtctctactaagaatacaaaatatagctgggcatggtggcgcgtgcctgtaactactcgggaggctgaggcaggagaatcgcttgaacctgggaggcagaggttgcagtgagctgagattgcaccactgcactccagcctgacgacagagtgagactccatctcaaaaaaaaaaaaaaaaaagaaaagaaaagattgctaaaaacagttcttcaagatattaaaacatgaaaacagaatttttattttaatgaaataacttggcagcagtctagtgttgctgcagagaatagctgggattgtgttatttgaagataccagaaatctactgaggcaggagaactagaggggctaaaactagatcaggaagaacctcagaaagttgagggacttccacagtagcttttagatatggggtagtttgctgtttgtgggcaggaggctgagaatctaggattttgtacaaaataaaggagaaaaatgttatgatcagttggtacagaaaaaagcacatgacttgattaaactctactcattatggtaagtggcaaactagtaatagaagggaacttagtatgttaaagacaattggcaaaaaccaacagcaggccaggcacggtggctcacgcctggcatcccagcactttgggaggccaacccaggcgattctcttgcgcccaagaattcgagactagcctgagcaacatggcaaaacaccatctctagaaaaaatacaaaacttagccaggcatggtggtatactcctgtagtcccagctatttgggaagctgaggcaggaggatcgctgagtataggaggtcaaggctgcaatgagccaagatcaggcccctgcactccagcctgggtgacagaatgagaagaatgtcattttctttttcttttcttttttttttgaggcagggtcttgctctgtcgtccaggctggagtgcagtggcacaatctcagcccactgcaaccactgcctcctgagtttaagcgattctcctgcctcagccttcggagtagctgggattacaggcacctgccatcatgcccggctaattttttttttttttttctatttttagtagagactggatttcaccatgttggccaggctggtcttgaactcctgacctcaagtgatccacccacctcggcctcccaaagtgctgggattacaggcatgaaccaccgcacccggccgagaagaatgtctttaaaacacacacacatgcacgcacgcatacacacacacacacacacacacgccaggcgcagtggctcatgcctgnnnnnnnnnnnnnnnnnnnntgacttgattaaactctactcattatggtaagtggcaaactagtaatagaagggaacttagtatgttacagacaattggcaaaaaccaacagcaggccaggcacggtggctcacgcctggcatcccagcactttgggaggccaacccaggcgattctcttgcgcccaagaattcgagactagcctgggcaacatggcaaaacaccatctctagaaaaaatacaaaacattagctgggcgtggcaggatgcacctgtagtcccagctactcaggaggctgaggcaggagaattgcctgaacctggaggcagaggctgcagtgagcagagatcacaccactgtactgcagcctgggtgacagagtgagactctggctaaaacacacacacacacacacacacacacacacaaatctgacagcaaacattacatttagtagtgaataaaaagctttcaacttggcataagaaacaaggagaatccctagttaatcaccacctctattcagtattgtagtggaaattcttgctagtgcagtaagccaagaaacaaaatggaaagccttaataaaagaattgtaaatgaagaaataaaatggcactatttgcagatgatgtgattgtataccaagaaaaaacaaaagaatctacagacaatttatgagaaaaatgaatttagcaaggttgctggatataagggcatataaaaatgaacagaatttttttattctagcaaaaaatacaaacgggccagtaaacatgaaaaagtgcttatcagcattaatcattagaaaaatgcaaatgaaaaccacagtgcaataccactttacatccatcagaatggctacaatgaaaaggatagacagtgctaagtttggcaaggatatgaagcatctagaatgctcatacactgctggtggcaggaaaaactggtacagtcattttgggagttagcagtgtctgctgaagttgaatgtacacatacccgtaactcatcaattctgttccttgtgtatgctcaacagaaatttgtgcacacattcaccaaaaacatgtacaagaaagtttatagaaacactattagccttcaactagaaacaaaccaaatgcccatctgcagaatggatgaatgaattgcaatgtattcatacaatgaaatgaatgaaatacagtcacatgaaaagtgtgaatgaatctctcaaatagtgttgtcagatacaaaagggtacatactatatgattttaatttaaagttcaaaatagggaaaactataatagaagtcatggtaacagatattcttgaggtgttgggtttgggtggaactgtaactagaaggagacacttaacacagttggtttgcgtacttttctttatgtgttatgtacgtcaatgaaaatttgcatttaaaaactcaggaagaagttaaacactgtagccaggtaactctcaacttgtaggctgtaagtcactagacgatgggacaggactacataagaagaaaaggaaagctttcttcctcatgttgtgggctcctgtggtgtattcctagccatcttttatagactaagctcagactaaggagtggaattgctgggtcatacagttactctttgtttagcccttttgagtatggctagactgttttccaaagtggctgtaccgttttacattcccataaacaatgtatgagtattccagtttctccacgtttttgctaacacttcttgtgaaatggtacctcattaataaaaattaactcaaagcattttgatttgcattccttgtatattctagatggaaatcccttattaaatacatgatttgcagagtttttctccaatctgtgaattgacctttcattcttaatggtgtcttttgaggcacaaatgtttttaattttgatgtttaattaacttatttttttcttgtgttacttatgcttttgtgtcatatatctaaaacatctttgcctaatccaaggtcacaaagacttaacacctacgttttcttctaagagtttgataggtttagctcttacatttaggtctttgctttgagttaatttttattaaggttaatttgtcaaatgtaacccagaagcatatagaaaatctatgaagaaaaaataggtgtttttttttttttttttttttttgagacagcgtcttgctctgtctcccaggctggagtgcagtggcgcagtcatggctcactacagccttgacctcctaggcacaagcaatcctcctgcctcagcctcctgagtagctggcatatatcaccacacctgactaatttttacattttttgtagagatgaggtctcactatgttgcccagcctggtcttgaaatgctgggctcaggcgatctgcctgcctcggcctcctaaagtgctaggattatagacttgagccactgtgcttggccaaaatagggatttttgacatttatttttataacatttttacagttattttaatttttcaaacaagcctgggtttattatttaaaattatcagctaaattagaaaagtaaacttttattttaatcctcattttctaatggtgagataagcatcctgaactatttttttcaagaaaaggcatacctattctgaaggtggcagcagtagtagttaaccagatgtgacaatggaagtaacttaaagaatgaagaacaggctactctgggcacgttgcctatggggtagtcctgctccacaaggagcaatgtaaaaaaaaagaagaagaacagtaaaatgaatacaatagagtttgtattagttttgctcagaaacatgaccccctctcatattgaatttggttttgtagccataattgatgatgaaatacataatacataaactacagcatcttatttgcagaaatacactggctaataaagccatgaaatcatcaaaacttaagcatcaaagacaacaaaacataagtcagttcaaaaccaaaagaaccatggagaaataataaattgttgggcaactatcaccactatccatcttgagaactttttcatcatcccatattgaaactctgtccccatgaagcaacaacactacatttaccactcccccacaatccctctgttctactttctatgattttgactataatttgatttcatataagtggaatcatacaatatctttttattttttttttgagacggagtttcgctctgtcgccaggcgtgtacggtggcgtgatctcggctcactaaaacctctgcctcctgggttcaagcagttcttctgcctcagcctcccaagtagctgagactacaggcacgcgccaccacaccagctaatttttgtatttttagtaaacggggtttcaccacgttggccaggatggtcttgatctcttgacctcatgatccgcctacctcggcctcccaaagtgctgggattacaggtgtgagccaccacacccaacccaatatttatctttttatgtctggcttatgtcacttatgtcttcacagttcatctgtagtgtagtatgtatcagaattttattcctttttaaggatgaatgtatttcattatatgtatataccacattttatctgtttatccattcattggtgggcagttgggttgcttccacattttacctattgtgaataatggtgctatgagcatgggtgtacaaatatctgttgttcctgctttcagattcatctgggtgtatacccaaaagtgaaattactggatcatatggtaattctatgtttactttttttgagaaattgccatattgttttccacagtggctgtatcattttatatttccaccagcagtgcataatgggtgcagtttctctacatcctctccaacactttctcgttttcagtttttgtttttttaatagccattctaatgggtatgtagtggcatctcattatggttttgatttatatttctctaatgatgagtgacgttgagcatcttttcatgtactttttggctatttgtatatcttctttggataaatgactattaagtcttttgccctttttttttttttttcttgagacattctcactcccaggctggcgtgtgatggcgtgaactgcaacctttgcctcccaggttcaagtgattctcatgcctcagcctcccaagtagctaggattacagatgtgtaccaccacgtccagctaatttttgtatttttttgtggagatggagtttcaccatgttggccaggctggtctctaactcctgacctcaagtgatccacttgccttggcctcccaaagtgctgggattacaggcacgagccactgcacctggccctttgcccatttttgaattgagttgtttcgttttttgttgtaattctttatatagccttttgccttttagtgttctttaactagagacattttttgcttaactttcaaagtggcttactggattggttgcaggaccaaatctctcatctgtgtatggcaggtgttgactcttttaacctcctttgttgaattttaatgttgatgttaattgagttttggcatgatattctattaaccttccaaataataagcttaatttcttgatccagccattgttgaatagtgccctttggttttatattgcttatgaaaattctagcagctcatgaaggggataagatcacttgtagtgtaccatatgttatatgcatttcatcctcacaacttgtgagatgtgtattctgcatttttcagatgaaggactgtggatcagagttaaatcgagtaaactgctcaaaatatgtatctgatagtttactaatgttgatatttaaccaagttttcttcaagtttattatcaatttatgcactgaactgattttataaaactcttacatgtaggcttgtatctacatttcaagagtatagccatcactgttttataatagttgttaaaattgtagttgttcctacttaaggactatgtttagtttcttcctttaaatattacccaggtatgactacaaatattatccaggtatgactatagagagccaattagctaagtgattgcccgaaaccaccctatcttattgctgcctttaacaaaaagaccaagaattggatgaaaaacaaccctgcttcactcttggcttttcaaaagtatgtaactggctggcctgaaggtagtgagttatctcaattgatggttcacaatcagttgaacacagatcaaactccttgttctacactttaccccctacttgagtagggggtaaagactacttgagtagtcttttaaaaaaaaagaagaagaaaaaagcatataaccactaagttgagaaatttatttactttaagccattaaccagttcttttcctggctatataatcccatacacaacattatttctgcccaatagaaattttaaaagaaaataaatatctgaagttaattttaatatttttaatttagtccaatatatccaaaatattgtatttcagtgtgtaattaaatataaaaatcactagtgaggtattttacattcattccttatattaagtatttaaaatccagtgtgttaaacttacgacatatctcaattcacacttcccacatttcaagtattcaatagccacatgtgagttatgcctaggggtattggacagtgctgattaggaggtttaaaatgcaactcataaatttaattcatctcttcgatctcagtaaatgacccttctttctagaggtcattctactattcctctcttccttaccctccacttcagacaattttattgattttttgtcttttaaaattttgtaaatccatctttttatctcctgccctaccacagctccagtttggggattcatattctcttacctggactattgcaataccctctcagttggtctttgtgtctctgcttttgcctcataaatttcacttctactgttactaattctgattccaaaatctgctttgcagtgagaatgtctgcctaactgaaaatgtcaccattctactccactacttaataccattcaatatattttagtgatttcacattatttcaaataagtagtctgtgaggtaagataagtatgctgtcctatactatcacaagggatgcatacacaactctttgggaatgtagggaaaggagagtagatatccttttctcatattccttttaaaactgcatgtttagtatctctttctatgtacataacatagaacatgtaaattatttatcagtaaatatattcacagtcccacatcacttaatgaggggctatgttctgagaaaggcttcattaggcgatttcatcgttgtgtgaacatcatcaatgtacttacccaaacccagggtggtatagcctgctacacacttaggtacttggtatagcctattgccccgaggctataaacctgcacagcatgttactggtttgaatactataggtcattgtaacacagtgataagtatttgtgtatttaaacatacctaaacatagaaaaaagtagagtaaaaataccttgtaaaagattttttttaatgatacacctttatagtgcacttttcatgaatggagcttgcaggactggaagttgctctgggtgagtcagtgagtggtgagtgaatgtgaaggcctaggaatttactgcacactactttagactttataatcactgtatacttaggctacagtaatttattttaaaaagatttttttcttcttcaataataagttaaccttagcttactataaattttttactttataaactttttaatgttctcaaactgttttactcgtgtagtaacacttgacttaaaacacaaacaatattggccaggagcagtggttcacatctgtaatcccagcactttgggaggccaaggcggatggatcacttgaggtcaggagttcgagaccagcctgaccaacatggtgaaaccccatctctactaaaactacaaaaattagccagtcatgggggtaggcgcctgtaatgccagctactcgggaggctgaagcaggagaatcacttgaacccgggtttctcagtgagctgagatcataccactgcactccagcctaggggatagagtgagactctttctcaaaacaaacaaacaaaaaaaacacaaacatattaatgggtccaaaaatacacttagatacaatgaataatatctagtatttggtagtacaataggttgctgtagttaacaacaattgattgtatattttaagtaactagaggaatggaattggaatgttcctaatacaaagaaacaataaaggcttgagatgacggataccccaattaccctgattaatcattacacattgtacagctgtacaaaaatattttctttatatccttattccataagcttttttctgtttgttttttaatttctaattttttttttttttttttacttttgaaacttttttgttgaacactgagacgtggctgggcagggtggctcacacttataacccaacactttgggaagctgagatgggagggatcacttgaggtcaggagttcaagagcagcctgggcaacataatgagaccctgtctctacaaaaaagaaattagcgaggcatggtgacatgcacctgtaattctaactacttggaaggctgaggtggaaggatcacttgagcacaggaggtttaggctgcagtgagccatgacggcaccactgcactctagcccgggcaacagagtgagaccctgaatccaaaaaaaaaaacccaaaaacagaaaactgagacagagggccaggcgcagtggctcacgcctgtaatcccagcactttgggaggccgaggcaggcagatcacctgaggtcaggagttctggaacagcctggccaacatgatgaaaccccgtctctactaaaagtacaaaaattagccaggtgtggtggtgcacacctgtaatcccagctactcgggaggctgaggcaggagaatcgcttgaacctgggaggcggaggttgcagtgagctgagatcacaccactgcactccagcctaggggatagagcgaaactctctctccaaaaaaggaaactgagacacactatcctaggcctacaggggggtcaagatcatcaatatcactgtcctccacctccacattttgtcctactggaaggtcttcaggggcagtaacacacatggagctgtcatttcctgtgataacaatgcgttcttctggatacctcctgaaggattgcctgaggctttttacagttaactttaatttataatttgaagaagtacgctctaaagtaatgatgaaaagtatagtttagtaaatacagaaaccagtaacatagtcatttattatcattatcaagtattatgtactgtccataattgcatgtgctagacttttataggactggcagagcagtaggtttgtttgccagcatcaccacaaacatgtgagtaatgcattattactcacattaaccattacgatggttacatcactaggcaatgagaatttttcagctccattgtaatcttattggactactgttgtatatgcggcccatcattgactgaaatgtccttatgtggcaaatgactatagttttaatttcagtaaaaaactataatctacatagagtaggaaaagataagtctgttagctgtacaagggcagagtttttgtgttttttcactgacttattctcagtgtcaataacagtatccggcatagaatagtaactggtcaataaatatttgttgaataaataaatgctgtgcatagaaaaacactctaactttatactttattagacctttaaggcaaaaagtaagtttaaataaacattttctcatctctattcaatttaaatttttgacacttgaagtaaaacttaaattactgtcttcttgcattatcttacagagatttgtaaagaaagtctctaatatgtataatggagtaaaaaaaacttttttcccttctagtaaacgaagcaaaaaaggagataaaaatgggaaaggcttgagacacttttcaatgaaagtgtgtgagaaagttcaacgaaaaggtacaacatcgtacaatgaagtcgctgatgagctggtgtcagagttcaccaattcaaataaccatttggctgctgattcggtatgtaaatcatgaacctgacattgattttgatggatgatgctacttctttgtgttatctttgttatagatttgaggaatcacgactatacttgagggttttatcctttattttgggggattttttgttgttgttgagttttattttggagggaattcctttttttttgttttttaggcggaacctcactctgtcgcccaggctggagttcagtggcgcgatctcggctcactgcaacctctgcctcccaggttcaagctattcttgtgactcagcctcccgcgtagctgggattacaggcgcacaccaccattcccagccaatttttgtatttttagtagagacagtgtttcaccatgttggccaggctggtctcaaactcctgacctcaggtgatccacctgccttggccttccaaagtgctgggattacaggcgtgagccactgtacccagccttagttgttttttttgttttttnnnnnnnnnnnnnnnnnnnngcgcggtggctcacgcctgtaatcccagcactttgggagtctgaggtgggtggatcatgaggtcaggagatcgagaccatcctggctaacactgtgaaaccctgtctctactaaaaatacaaaaaattagccaggcatggtggcatgtgcctgtaatcccagctactcaggaggctgaggcaggagaattgcttgaacctgggaggcggaggttgcagtaagccaagatcgcaccactgtactccagcctgggcgacagagtgagactccgtctcaaaaagaaaaaaaaaattggtcgcctatccaataattttttattgtttctgaatcttattgtttcttcaatgtctaagtcaacaagaaaattttatttttaattggaaaaggaatacataaatatgtttataaaaaattcagttgtctggcagagtctcaaataaatggaatacagtggtgcagtttcggctcaatgaaacctctacttcccaggttcaagtgatgcttgtgcctcagcatcctgagtagctgggaccaaaaatggcaaggctctgcctctacagaaaaaaaatttatttctttatcttttttttttttttttgatatgaggtctcactatgttgcccaggctgattttgaactccttgactcaagtgatcctccagcctcagcctcccaaagtgctgggattacaggcatgagccaccatgcctgacctctacaaaaagtttttttttttaaattagcgaggtgcagtggcacaaacctgtagtcccagctactccagaggctgaggaggattgcttgagcccaggaattcaatcatgccactgcattccagcctgggcggcaaagcaagacttcgtctctttggggggaaaaaaaaaaaaaaaaaaaaatatatatatatatatatggctatgactgtttctctagagcactgatttagccctatcctattgattctgatatattattctttagatgttctttaattttggttttaatttgttctttgacctaaggattgccttagaaagagttcttatagttccaagttttgtttgttgctttaaagttttacttttattacttaatttgtccagagaatatgatttgaactatttcccttttttttttggattacattgagattttccttgggagccattatatgtgattttctttttcttttcatgttctctaggcacttgaaaaaaaaagtctatagcattctgtttctgagtgaaagccatggttctcacaatgatctgcaagcccctttgtgagcttgcccaccattacctcactaatctcgtcttctgctatgcactgtctcatttactaccctccagccacatgtcactatgctccagctacatgttttgtccctgatcaggccattacactgctttgcctagagcagtctttgctaggtattcatatggcttctctctccctgccttgtgatcttcactcacctgtcaccacaatgaagcatttcttcttagcacttttcaatatctaaaatacatttttactaataccctatcaccaccaccttcccaggatataaacaaaggttgagtttttttctctttattcactgctttgttatttttctgataatttagaatgcttgtagtctcagttcttcagttggttacctttataacttaagttccttgagttaccacctgtagacagtatctattggttatgaagaaaaacatatgtttttttctgtcttccatttttctcttctaccatgggactcagattagatatattagtatatttgttaaaaagaataatactactactataggccgggtgcagtggctcacgcctataatcccagcactttgggaggccgaggtggacggatcacactgtcaggagttggagaccagcctggccaacatgatgaaaccctgtctgtactaaaaatacaaaaattagctgggtgtggtggtgggcgcctgtaatcccaactactcgggaggctgaggctggagaatcactggaacccagaaggtggaggttgcagtgagctgagatctcaccactgcactccagcctgggcaacagagcaagactctgtctcggaaaaatagttgtttttattactttaaataaatagattgtgctgaaccctttattattatttaatctgctttgaacaacatccatatcccttccaatatcaaaaagaggaaattggcatacctatcacattgcctcctcccagtacttgttgttacagtatcattgtttctacagggtcaagatttcttttttttttttttttttgagacagagtctagctctgtcacccagactggagtgcagtggctcaatcttggctcactgcaacctccatctcccggattcaagcgattttcctgcctcatcctcctgagtagctggcattacagtcatgcgccaccacgcccagttaagttttgtattttttagtagagatggggttttgccatgttggccaggctggtcttgaactcctgacctcaggtgatccgcccaccttggcctctcaaagtggtgggattacaggcatgagccaccactcctggcccattgtcaagatttctagtatttacattcagttctataacttaaatcccccacttatttagatctagttttatatttaggtggattcagtgttctccaccatcctttattatcgttgcatttcctgaggaccttgttccacaatgtaaaccaacatggtttccttgattaagtcttactatcaaaaaatagaagaaaaaggccgggcatggtggctcacacctgtaatcctagcactttgggaggtcgaggcaggcagatcatgaggtcaggagttcaagatcagcctggccaatatggtgaaaccccgtctctactaaaaatagaaaaattagctgggcgtggtgatgtgcatctatagtgccagctacttgggaggctgaggcagaagaatcgcttgaacccgggaggtggaggttgcagtgagctgagattgcgccactgcactccagtgtgggcgagagagcgagacactgtctcaaaaaaaaaaaaaaaaaaaaaaaaagaagaagaagaaaaatggtcagctgaactgaacagtgtcccttgtcatatagaggattatattttggtacaagttcctagtcccattgtagattggagacagtttgcagatcagcagtggtcaaggaacacattttgagaagcacagttttacccagaacttgaataaatgtccttgatttttttaagtctaaaatcctcccagataatgcaagggcttagaacactttacctccaatacctttttctgttaatatgtatactatttgttgtcatgtatattaagttctgtattctagactccataaggcattattattgttttatacagtgaaaattgagatttacccacatatttacttttttgggttggtcttcattctatcctacatacctaagctcccatcttagatgatatttcttctacctgaagaaatccctttagtatatttcagtgtagatctgcaggtaacatgatctttatttttaagattattttgttttatattgtttgaaagtatttttatttcatctttaattttgaaggatattttctcggaatatagaattcttttggatgtttttgtcagttggctaaataaaaaaatagaatccttccagcactttgaagttgtaatattaatttgatatattcatatcatgtgactgtatcttaacccttaagatttatcactcagtgaaaatattttttagcaggcttatgatcagaagaacattaggcgaagagtttatgatgctttaaatgtgctaatggcaatgaacataatttcaaaggaaaaaaaagaaatcaagtggattggcctgcctaccaattctgctcaggaatgtcagaatctggaggtaagtgagaaaatctgtttatgaatagctgtttgcattattttacatcacaggcattttaatttaaaaatgtaattctaatataaaatatttccaatttttcatgtataccatgtcattttttaacagactgtagaattttagaattggaaggcgccttataggtatagtctgcagtttaatttgcaaatgatgaaactgagggatataaaagttgaataacaatttgattttactgtttcttagagaagatttttatttcatcctaagttaattctgagcactctactaataaacttttggtgaaatggtatcttatttgatgagatgcttgctgtatgtatccaaaaaaaaaaaaaaaaaaggatcaagccggctgtttatttcctttattggttacacaatattctgaatatagctgtggaagtcagacttttactttgaaatagtagcaacagaatgaatagtgtttcatttgtgtctttaccagaatggatagaattttggaatgatgtatgcagaagcattttaagttctgttaactttaagcattatagaaaactcttcctaaatgagcatgttccctgacatactgtttctaaattgacttgacataattttactatcatggccataaatggagtaaactgaggttaaatatggcttctgggccaggggcggtggctcacgcctgtaatcccagcactttgggaggccgaggtgggtgtcaaaatggtaaaaccccgtctctactaaaaatacaaaaattagccagtggcagacgcctgtaatcccagctacttggaaagctgaggcaggagaatcgcttgaacctgggaggcagaggttacagtgaaccgagatggtgccattgcactccagcctaggcgacaagagcaagactccatctttaaaaaaaaaaaatatatatatatatatatatatatatatatacacatagctttgggagataattaagattggtttcctgtttttctcagtcttttctccccagcaattcagttatttggtattattatacttatggatggagagagaaaccagatattcatcagaagctatataatatttttcatatgctacagtggaaatatcctccttttcttgtttttcttccttctcatagagtggaatttgagcatcattttcatgaccagtaatattgagctgataccaaagactcattaagcaaaaaaaccctattcacatctaccttgtgcttaatcacaggttatacaaggcaaatctctgaccccaaggtactgtcattctcaccggggagaagagaaatgtaaaagagttaccgaaaatgtgattactcctaagaaagaaatgtacagattctctgcaaagagggctgagggagggctttactaaggagataatcccagagctcaggcatgaggtgggagtagtctgccaagtggataagggtggggagggccttcaaggcagaggtgccacatgggctgagacaggcatgagaaagcttgcctggagctgggtgtggctagggaacaggcatggagaaaggaggatagatatctaagtgttaagcagtggagacctgatcctgtaaacaaagggaagcagttgataaattacaaagagaagggttgataggatgttttttaaaggatcactctgccagtgggttggaaataaaattaacaggtagggaaggaaatggaatgggggaggcggattagagatggtctgagttacggcagcggccatgagattggagaggtgttttagaggtacaatcagtgcagcttgacctggttggatgagggacaggtaaggggcctggcttgtcagagcttctgataaagggatgctcctacaacatcttttcaaatgcagaacgccacacagattttacagtgaatcttaagtaatttaaaagtaaaacgtggtggatagaggaaccatgaatggaaactgctagtatagactagactggatgtggagcaagtaagagataatctgctggagcagacaagaaaaatgtcttatttgatgattgaaagacaaaattgtaacaaatttagtttaaagatcttaattgccttttatttgtgattctagaatctggcaacacctcactagtaagtagaatgagtattcctataagctgagcagaagaggttgaacattcttcagtgttttaaagatagagaagcagcaaaggcggatagaggcagaaacagaacaaaaagcagactggacatatcaatgtcactttccttgtaagggtaaaatagagaagactctcttatgccagctgcaactggcctgtttgggtagtttgctattctctttctctcctgatttcctaggtcagataaacaactcagttttggcctggtggcatttcagcatgagtgactccatttttgtttggtctgttgagcttagtgcaggagctcagtccaaaccaatgggctcctataaattttctttttttttttgttgagttggagacttgctctgtcacccaggctggagttcaatggcgcaatcttcggctcactgcaacctccgcctcccgggttcgagcaattctcctgcctcagcctcccgagtagctgggattacaggcgcctgccaacacgcctggctaatttttttttttttttttttttttttagtagagacgaggtttcaccttattggccaggctggtctcttggccaggctggtctcgaactcctgaccttgtgatccgcccacctcggcctcccaaagtgctgggattacaggctgagccaccgcgcctggccataacttttcttaataaatgtcattggcttttgcccaaggagacagtgaggaactcaactgcaaggaagttcagaccctaatgtctgttttctctgagtagttatcagattgagaaaaaaagcagtagtttgaagctggaaaatttgtccaataagcatgtttctttttttttttttctttttgagacagggtcttgctttgttgtccaggctggagtgcagtggcatgatcttggctcactgcaatctctgcctcccaagttcaagcaattctcgtgtctcagcctcccaattagctgggactacagatgcgcgccaccacacctggcttttgtattttttgtagagatagggtttcgccatgttggccagactggtctcaaactcctgatctcaagtgattctcccccctcggcctcccaaagtgttgggattacaggcgtgagccaccacacccagcctaccatgatgtgtgagatatctgtattatcagctgtcctcattggagagtcagctaagctggaattgtaaataagatcttgccttattcttagaggagtaatataacaaagtaattaataatagagtccctgtaaccagaggatttaggttcaaatcttggctcttgccattcactagctgcgtgaccttgggtagttacttaagccctctatgcctccgttcccttcgatgcaaagtggataacaacaggacttaactcataaggtttttgtgaaggtgaattaagataatgtgtgtaaaatgcttacttttgtgttggcagatagagtgagtataaactaagtggtactattactttgattagaacttgaataataattgcaacaagtactgctaacaagtattcattaagtgtatgatttcatttttaatgacagttgccacagatctgatgttgtgtctacttgttcactccagcccctgccccctacaaagatatgatttgtctttattcatattgttaaaatgggttcagtttctctagggaaaattgttatctcagaatagggacctggaaagtgaacgatattttatagtctacctatgttcatattattttgtaaccaatgttttaaagatagagaagcagaggcggatagaacggataaagcagaagcgggcccagctgcaagaacttctcctacaggtaaagataccgagatgttttcattaccttccctgtttctccacttgctgccttttggagtcagtgtgttttctaattgtggtgcctctgagtggtgtgtggtgagcccacgccagggcagcctctctcacctcctagcttgttgccatccacgtgctctgccttaagatggtcccatctgttgccatcatctcagctccacagtagcttccctgccctgtgtgtgacttacgccaggcagcagttcactgttgacactcaggcctctctaaacataaactgtcaggggtctttttgtgtttgtttattttagcccgaatttggaatatccactagtgaagctagttaaattttaggtgcttcaagtacagtaatcaaatctgcctgtaatacttaattttatcagtaaatgacagaatggcatgaaatagttcagtaagatttttgttgttgttgttttttgagactgagtctcactctttcgccaggctggagtgcagtggtgcgatcttggctcactgtaacctctgcctcccgggttcaagccattctctgcctcagcctcccaagtagctgggattacaagtacccgccaccatgcctggctagttttttcgtatttttagtagagacggggtttcaccatcttggccaggctggtcttgaactcctgactttgtgatccacccgcctcagcctcccaaagtgctggggttacaggcatgagccaccacactgggtctgtttcagtaagatttatagaaataccaaaatttaggccggtatatatatatatatatctcatatatatgagatatatatatgttatatatatatatatctcatatatatgagatatatgttatatatatatctatatatatgagatatatatgttatatatatctatatatatgagatatatatgtgttatatatatctatatatgagatatatatgtgttatatatatctatatatgagatatatgtgttatatatatctatatatgagatatatatgtgttatatatatctatatatgagatatatatgtgttatatatatctatatgagatatatatgtgttatatatatctatatatgagatatatatgtgttatatatatctatatatgagatatatatgttatatatatctatatatgagatatatatgttatatatatctatatatatgagatatatatatgttatatatatctatatatatgagatatatatatgttatatatatctatatatgagatatatatatgttatatatatatctatatatgagatatatatgttatatatatctatatatgagatatatatgttatatatatatgatatatatgttatatatatgagatatatgttatatatgagatatatgttatatatagttatatattatatatattatatgttatatatagttatatatattatatattatatatattgttatatattatatataattatatataatatataatatataaataataatgttttgtttgaagagaatattgtgcagctttaaaaaaaaaaaagctgaaactgacagtttattcctatgctcctgcctgtagaattctaccaaacactcctccttgaactcctgtgctgccatcttcttccccccggcagcctctctgttgtccctgtccctgcacagttatctgcagtatcccctaagagctcatgccccaaaccctgtgctggggccctcctggaatttcttcaaaaccatggaacattttggagcttaatttttttggcacgttatttttaaaaacctgtttatcagcatgccaacagtcatctgcctatcagaaagaatggtgctgggcaagatcaccctcatgtgtgtaggactttcctgtctctagatgcctgatgcaaagaatgaaaccatattttttccctgcttacctctgtaccatgaacattgtttttttattttttaaagtcttgaacttcttttcctctactgtctctcaaaccaaatatttgtagaagagttccacccaggggcaacatggctgtcaacattcatagaaacaggtctctctaaacattaaagtgaaacccaaagtataactgaaatcaacttgtggtcttctggtaaacttaaaacttatttccaaaggccggatgtggtggctcacgcatgtaatcccagcactttgggaggcggagacgggcagatcacctgagttcaggagttcgagaccagcctgaccaacatggagaaaccccgtctctactaaaaatacaaaaaattagccaggcatggtggcgcatgcctgtaatctcagctacttgggaggctaaggcaggataatctcttgaacctgggaggcagaggttgcagtgagctgagatcgccccactgcaccctagcctgggcaacaagagcgaaactctgtctcaaaaaaaaaaaaaacaaaaaacttatttcctcctagcatttcagtttttttcctttcatcaaataaattaagttgtcatagaaagtaaattaagcagccaggcacagtggcttactcctgtcatcccagcacttggggaggccgaggtgggcagatcacgaggtcaggagtttgagaccagcctgacaaacatggtgaaaccccgtctctactaaaaataaaaaaattagccaggcatggtggtgcacacctgaaatctcaggtactcaggaggctgaggcaagagattcacttgaacccgggaggcggaggttgcagtgagccgagattgcaccactgcactccagcctgggcaacagagcaagactctgtctttttttttttttttttttttaataagtaatccatttgctgtggctaagctcacttgatttttttttataagctcatgtcacaactcactcatgtcacatgacacaggtaactattacctccttgctaccacctctcttttatttttggtaatgtagaagaatggagtgagtaaagcaaacctgtagataatcccaatatcctacttttatctctataattgccctttccagcccttaaaccttttccataataaacgcataggaaaatgaatgaacacacttaaagctgttcagcctctggaatagatgttaatgagtttgaaaaagaacaaaaggccaaaggaaatcaatcaaagggcaacaaataagtcagttcaaaataagtgaattatttttccttttactatccaaaataacattatatggtatatgaaatttgtgacagtgttaaaaaaaacattattatgaccaggtgcagtggctcatgtctgtaatcccagcactttgggaggccgaggtgggcagatcacaaggtcaggagttcgagaccagcctggccaatatggtaaaaccccgcctctactaaaaatgcaaaaattagccaggcatggtggcgggtgcctgtagtcccggctactcgggaggctgaagcaggaaaatcatttgaacctgggaggcggaggttgcagtgagctgagatcgtgccactgtactccagcctgggcaacagagtgagactccgtctcaaaaaaataataataaataataataataaaaacattatgtttttactgctctcttcacttgaaaaaccattgatactattaaatgtacacagcattaaatagtgaatcacaaatacataagggccattagttatcactgcttatattcccccatataccagggtcctcttgtggcactagggacagacaccaagttaggcaaagtgtaggaacagctcttgagatgtgtattctagtaaaagggaagagaagctatgcaggagtatttaagcatgtaattctttttctcagttccacagtttaatcataatttttcctcattattaaaggaattaagcaatgaattcgttttttagcaacagaaaataatgaaatgtaacctcaataatgtttggtaatgatattgatagtgctagttattgatagtgatttttggacacacttaggtctacaataaattggtgttcattattttttgtgcttttcaaagagtaaatcttccccttttggggagatagcactcagccattttaagataatagtaatcttttcttttcttttcttttttcctttcctttcctttcctttcctttccttcccctttccttccccttccccttccccttcccctcccccttccccttcccctcccttctcttcccttcttttctttcctttttttcttttctttttcttcttgagaaagggctctgttgcccaggttggaatgtagtggcacagtcatagctcactgcatcctccaactcctaggctcaagagaacttcccacttcggcctcccaaagtgctgagattacaggtgtgagctaccatgcctggccaataatagtaatcttactgaaactttagttaaggtccagaacctgaaataaacaatactgatcataagattgctaaaatgtaaaaaataaatttatcactactgggtgacaagattataacaagctaatgaaggggaatgaatggctctgacttgaggaacttttaaaacgttatctgtttcttgagcagatgaaaaacttgaactgcatacagtctttctagctgtgaaattctatcgtacatttaccttattaaaaaaagggagatcacttgtttgtttgttggttggtttttctcagacagagttttgctcttgttgcccaggctggagtgcagtggtgcaatctcggcttactgcagcctccgtctaaaagggagatcactttctttggcttttgagtaatggttataactaaaagtagcggcaagatccagtaaaaaaatttaggccttgatgtatcttataattagtgctgagcctcagttacctcatctggaaatgtctggttggggaaggctggggctggattccaaactgtgcccagaggctgctgagaagttctgtggaggtgccttagaaaccatgtggctgtgcttgagggcagagatggcagagcttaggacctggcctcactgcagccagcctcaacagcaccacttccatctgttttacatgagtttttttttgttttgttttgagacagggtctcattctgtcacccaggctggaatggagtggtatgatctctgctcacagcaaattctgcctcctggattcaaacaatcctcccacctcagcctcctgggtagctgggactataggcacataccaccatgcccagctagtttttgtattttttgtagagatagggttttgccatgttgcccaggttggccttaaactcctggactcaagcaatcaacctgctttggcctcccaaagtgttgggattacaggcgtgagccactgtgcccagcctccctcgagattttatttgaagaaacaattttgtgcctttaaaatgtttgcatatccctgggctacacatcctaaagtttgggggcatatttgaccccaaactgtcaggagtctatgttagataaatggtatcacccttgctgtgtcatttgctgaagagttccaggtgcctactggttctttcccagattgtgaggtcctgtttctatggatgatggaaaaatgtatttattgagttggatcattctttcttaaatgtttaattttttaaattaattcattagtgcaggcgggatgtctctttaaactctaattttaaactatatttaaaggtattatcttaattcttttaaattccaactcacttatgcacaattgaccatattgtttttattgatcattacagcaaatcgctttcaaaaacctggtacagagaaatcgacaaaatgagcagcaaaaccagggcccgccggctctgaactctaccattcagctgccattcataatcatcaatacaagcagaaaaacagtcatagattgcagcatctccagtgacaagtgagtggagaactagggatgggtgcagggctggccttctgttaacattttcatatcatttgcaaactcaagaaggatgcactttattagttgcacccctcaaaggctggcttccttggggcacatgaaacacctcctgaaccatgggtgcaatcttccactagtgtgcgctccaaccctcaccctctgtggtcccctgtcttgtgccaggcactgtgctgtctgtattatatgtgtgtggcagtgtctgggcccaacctatgacgtgctgcatgtatgtggtaactctgagcaagtaactgtgataagttagcccagcactgtgggtctgggacaaggtagattcattggtgattcaccgtcatagtttattacggaaatattttaggtcaacatgtggcattaaaccaattatttctttgttttgctatatcatagttatgcatgcttctgtttattaatgaatgtatgaatagacatgaaaatgcctggcacattctttgcttcctttaaattgtgtttttacattttaactaagatcaatgataatattcattatggcaaataagaagtagcacttttcaaaatatagaattaatttgtgatgtattttaccattcatgaaaaagtttctctcagtggtcttcaggctgtgaccagtaccataaaagagttaagagtatatatagggtgcagagtgagacggatccatgtaccgcttatggctcccccacttcgctgctgcaaagctctgttttctcaagaacaaataggaatgatactgggtcccctatgacttcccagccttgtgaggattaaatgagttaatgtctataatgacttgaggtaagtgttttttaaatgttagctgctgttacaaaaggtcagcctatagtttattgttcaaatagggatttattaatgcaaaagaagactctataataattgcgtcagtaccacaggcataccccagaactgtcccagggataccagaacttcctgtctcctagggccctgacattgcccttgggcttcactgctacttgttttcccactcttcttcctggcgctcttgcgccccctgccggtctctgttgtgtccagagattccgggccactccactaagaaggcacacacacaaaagaagagttagccaggcgtggtggttcacacctgtaatcccagcactctgggaggccggaggctagtggatcacctgagatcaggagttcgagaccagcctggccaacatagtgaaaccctgtctctactaaaaatacaaaaattagccaggcttggtggcgcacgcctgtagtcccagctactagggaggccaaggcaggagaaacgcttgaacctgggaggcaggggttgcagtgaaccgagattgtgccactacactccagcctggacgacagagcaagactctgtctcgaaaaaagaaaaaagaaaaaaacagcaggaatttcaaaactatttgataattgagactatagacacaaaaagaaatagtagaggttatgaagtaaaccagaaccaataaatttttttttaagagtggattcttggccgggcgtgttggctcatgcctgtaatcccagcactttgggaggccaaggcaggcagatcacctgtggtcaagagtttgagaccagcctgaccaacatggtgaaaccctgtggctactaaaaatacaaaaattagcgtgatgatgcacacctgtaatcccagctactcgggaggctgaggcaggagaatcacttgaacccaggaggcagaggttgcagtgacccaagattgtaccattgcactccagcctgggcagcaagagcaaaactccgtcccccccaaaaaaagagtggattctcactgttctcactgttgcccaggttggagtgcagtggctatttacaggcacgattatagctcactgcagcctcaaactcctgggctcaagcggtccccctgcctcagccttcctagtagccaggactgcaggtgcacacttccttggccaactaaagctgatccattttttaatcttctaagtttcttaacctctctgagatcatgttcctttctccacaaaaataagaattatagtatttaccttgccagtttcaaaaagttatgggtaaattaatatacaacccagcccagtggtcagtaagtggtagatatctgaattattttccacacacttgcaaattctttataaatatatgtcaaagaggaccattaacatagtctcagaaaactgagaattcaggccgggcacggtggctcacacctgtaatcccagcactttgggaggccaaggtgggtggatcataaggtcaggagttcgagaccaacctgaccaacatggtaaaacccccatttctactaaaaatacaaaaattagccaggcatggtggcacgcgcctgtactcccagctactcaggaggctgaggcaggagaatcacttgaacccaggaggtgaagtttgcattgagccgagatcgtgccactgcactccagcctgggcgacagagcaagactctgtctcaaaaaaaaaaaaaaaaaaaaaaacaacaaaaaactgagaattctggaaaatggttagcatcttttcagataaaaaacacaaaacttagcattctagttactctctcaaattagtctcttgttttgtatggagaattataaaactatcttaggttagtctcttaagtctaaaaagaatgatgggaaaatctgggaatcattggcctagggtattgtggacactgttcccccaggctggaatctggtgaggcttccatctcttgggtggtccctgactcatgccctttccttggccttcctttgagtggagggaaggaggctctgagtagcttgtacaagcttgttatccgacgtaggtccaaaaaccctttcagttactttggtgatgcagtctttccccataattagccaagaggctttccacaatgaggattacatttacaaaacgatctgcttttaacagatgcctgaaatcatccctgtggcaggcacccacttcagatttttttttttaagttgttattgtactttaatcaaattcatatactttagattacttaaattggtattttgcttcaaattataatttttgcttctaagataatctgttattcaaattatcttagatagggtataaagttttaccctcacatgattttaatagaatttcatgaccaggtgaaacctaccattgtccccaaaccctgtccctgcagggctgaggcccatgatgaaggtgctccaggcctagcctaggagtcggaaggactgtgtcttccttcttttgcctcttgattaacgtgtgttgggctgctgggaagctgggaatccaatttgggtactttccaaacatatttggaaacgtgcttgtattacatgtgacattttttcttaaaacattttactccttagcctctcaggacaggatttggggttgttttcacttgttgaaagtcttctatttattgcttatctgaagtaggctgtagctaacatttgactcatgaaaatgaagtaagcattcaaaatgtttttttcctcaaagctaacaggccaactcggaatagggatatcgtaatattaaagtagaaaggcttttcttttgtggcaaagctgtaggcaactttgagaagtactggatttagaataaaatttctatcctctgtttgtaacagagttagggctaaagtttgtgggtttctatcatctgtcagaggaatgttgttttaattgggaaagtgttttatttgagatgtcattcccctgacagagcagaatgactcatggctctctaaatggtagcaatttctagcactatagctggatttaggcccccattctgttacttaaactatagaatacaaaactattcagacctctccagcaccaccaaaaaccctttactttgtttcctgatgcaggtttgagtatcttttcaattttgacaacacctttgagatccatgatgacatagaagtactaaagcggatgggaatgtcgtttggcctggagtcaggcaaatgctctctggaggatctgaaacttgcgaaatccctggtgccaaaggctttagaaggttatatcacaggtatgttaactgatgctttcatgtgttgtccctgattaaatgttgaatccaaacttgttaaaacctttcttatagaaaattgcaaaattttagaacatctgtgcttgtgtcgacaaactgaaacctttaacactttaggaccattttttcaaaaattagattaaatagtttgtttcataacattatgaacttacatctatacaccacacattatatactattacatctaaattggctcactcagcactgaatttggctcttcagagagatcttgtaattcccagtacctagcttagagcctagttagagtaagctagtaaaagctcaatgagggagttttaaaaaatcttctcttagtgccctgtggatacttcaagggaaactttgggcaatttacaaaagaaagtaggtacatcctggccgggcgctgcagctcacacctgtaatcccagcactttgggaagccaagacgggtggatcacctgaggtcgggagttcgagaccagcctggccaacatggtgaaaccctgtctctactaaaaaaatacaaaaaattagccgggcgtgatggcacatatctgtaatcccagctactcaggaggctgaggcaggagaatcacttgaacctgggaggtggaggttgcaatgagctgagatcgccattgcactctagcctgggcaagaagagtgaaactctgtctcaaaaaaaaaaaaaaaaaaaaaaaagtaggtacatcctacttccctctaatggaaaatttagtatatctattatctgcccatacataaaaacatttgattaattgaattcagagaggaggagtggactgaaagtttaaatgtcaggggaaaaaagggcagaacggggtaaacctggattcacatttgtgtacgctgctcctctttacagtaaaacttctcaagttgaccatatttactgttccttcttcctctttccccagtcttaaattgttcttattaaatactgagtagatacaaaggttgtttacgtctgtagactctgaagggtcacagtacagtagacccccatgaatccagcacccagctgaggaaagcacattactgttccagtccactgcatgcccctgccccaggctctgtgccctttcccacccctcaaatataaccattctcttacatttcattgtcattcacttgcatttctttagagataaaccaaaatggtaaactggaaataatgtattatttagttttgcctacttctggcctctatataagtgaagtcatagtaatatactctttggtgatttgattttttttcactcgatattatgttctttagagtcatccatgtgatttaatatagatataattcatacattcttactcctgtgtaaaattccattatatgaatacatcacagcttatctgtttattttactgaaaataaactgtttgtttccgattgcttgatgttaaaatacagtgctgctttgaacattcctatacatgtatcccagtgaccacatgcaaacgtacagattgaacttgttaggtcagagttgggtacatcttcagctttactagatgataccaaaaattttcaatttgattttaccaaattacacgttccccagcagagtagaagtgttctattttcctaatcaggtgggtctgaaatgataccattgtagcttttctaaattgagattgaattcacatgccataaaatacaccatttaaaaatgtcagttcagtgatgttttggtatattcacaaggttgctaatcatcaccactatctgattccagaatattttaatttaaaaacccaaaaagaaacccaaacccattaacagtctctattcccccattctccctcagcccctggcaaccactaatctactttgtgtcactatggatttgcctattctagaaagacgctttatgtgaatggaaccctacagcatggggcattttgtggatagcttctttcacttagtgtagtgtttcaaggttcgttcatgttgtagcaccatcagtatttcattcctctttattgccaaatactattccattgtatggatggaccacattttgtttatccattcatcagttggtagatatttggactgtttccactttttggctatctcgaatgatgctgctgttaacattcttataaaagtttatgtgtaaacatatgtttttatctctaaaaacatatacctacgagtgaaattgctgggtcatatggtaactctgtgtttaacattttaaggaaataccaaactgttttccaaagctcctgtaccatttacagtccaaccagtggataagtgttccaatttctccacatccttacttacttatttagagacggagtctcactctgtcgcccaagctggagtgcggtgacgtaatttggctcactgcaacctccacctcccaggttcaagtgattctcctgcctcagcctcctgagtagctgggattacaggcaccttgccgctatgcccggttagttttggtatttttagtagagacaggatttcaccatgttggccaggctgatctggaactcttggcctgaattcacctgcctcagcctcccaaagtgttgggattatacatgtgagccaccgtgcctgccctccatatccttttctacacttgtcactatacatcttttgaattatagccatcctcacagaagtgaagtgatatctcgctgtgatttttgtgggggggggtggggcagggtggtggtggaggggagagagtcttgctctccaggctggagtgcagtggcgcaatctctgctcactgcagcctcgaactcatgggctcaaacgatccacccacctcagcctcctgagtagctgggaccacagatgtgtgccaccatgcccggttaaatcttttttttttttttgatatgtttggtagagatggggttttgccatgttgtccaggctagtctcaaagttctgagctcaagcgatccacctgccttggctcccactgtgattttgatttgcatttccataatgacttctgatgttgagcatcttttcatgtgtttattgactatttgtatgtcttcctcagaaatatgtctattcacattgactttttttttgagatggagtctctctctgttacccaggctggagtgcaatggtgcagtctcagctcactgcaagctccacctcccgggttcaggcgattctcctgtctcagcctcccaagtagctggaattacaggcgcccaccaccacgcccagctaatttttgtatttttagtagagacagggtttcaccacgttggccaggctggtctcgaactcctgacctcaggtgatccacccgcttcggcctcccacagtccatcctttgctcatttttaagtagagttacttgtctttttatagagttgtaaagttatactgagtatacttgaaaacagaagcactatgttttacatgtcctataattaagatttttttcactaatttagaaatcttcctgattttcctaattcctgaaaatattacatattttgtagatacaatttgactatataggttgggtgcggtggcttacgcctgtgatcccagcactttgggaggctgaggcaggcatatcacttgaggttaggagttcaagaccaggctgaccaacatggcaaaaccccatctctactaaaaatacaaaaattagccaggcatggtgacacatgcctgtaattccagttatttgagaggctggggcaggaaaatcacttgaacctgggaggcagaggttgcagtgaacggagattgcaccactgcactccagcctgggcaacagagcgagactctgtcttttaaaaaaagaaatgaatatataagcagtgtttttgcctttgctttcttttgtttattttatttgtaagtataaccatctagaatttcacatcgctttttaaaggcattttaatactagttctaagatacattaaatccaatgtaagcaaaaaggtagctttaattttgttttattctatgatttggtcctttgctcacaacagaagagtttgttggctgagatttggtttctgttttagttcttcggttggcaccattcatcccctgcaagggccccccgcctctccttgcccctcagcccacctgttccgtctccccacccagctttcctctctccacgctctccagcctgggtcctgctgtgtcattggaaggccagcagaatctgaataaagggcttactcaataaatcaccagaactttattttagcttactcccagtgaaaaggctcagggcgattaggcaggctctgtggttttgatctcttcgtgacctcatttgcagactgggatacagactttctggttagttcaaaggaagaaacatgtgcctctcgtgtgtaaaggggcagaatggcctgggtgggagtgtgagaaccattgtgtggatcctgtgataataggaaagaaatgtaggcttttccaattcattgtaaaaagagaatgtaatgtgttatgctcacaaacaagtaaatagctgtgttctgacagaaggtttctatagttctatatactaattaatattcagcacaagattctggctttaattttattttcttgtacagacttgtcgttatttaatgtatttaaagtctgctattcttcttagacttgaagtctcttttttttcccagctgtctcaaagaaaaaggttcataagacggttctaaaattagcatagtcatttagtttacttttttcctacgtgggaatggcctcttgtttggataccagagtttccaatctaaatcatatagtttcatttttttgtatagtaattgcaaaaagattttgattcaattaaatcatagctcattttggcagattacattttctgagtatgtgtttgggcttatagaatttctttttaggaattacttttaatgtatctaccacttattttgtaaagtggcagctgacagagactatactcattcattcagtaacttttttgtttttttgttttttttttgttttttttgagacagtcactcaggctggagtgcagtggcatgatctcagctcactgcaacctccgcctcctgggttcaagtgattctcctgcctcagtctctctagtagctgggattacaggcatgtatcaccatgcctggctaatttttgtatttttaatagagatggggctttgctatatttgccaggctggtctcgaactcctgagctcaatctgcccgccttggcctcccaaagtgctgggattacaggcatgagccaccgcgccccgccacatttagatcttacatgttccagttactgccttctttgagctaacactgtagatgggaagataaaaagtattaaaccagtaaaattacaataagaattgatcagtgttgtcataggataaatgtggtatatgtatagaaaagaagatggcaaggagatatccaaaatattttcttttctttttttcttttattttttgagatggagtttcgctcttgttgcccaggctggagtgcagtggtgcaatctcagctcactgcaacctccgcctcccgggttcaagtgattctcctgcctcagcctcccgagtagctaggattacaggcatgcaccacaacgcccagctaattttgtatttttaatagagatggggtttctccatgttggacagaactcccaacttcaggtgatccgccctccttggcctcccaaaatgctgggattataggcgtgagccaccgtgctcagcccaaactattttctgtagactaaaacagtaacgtctgtgtctgcctcattaaaaacatgactgcatgtgacctttttaaaataagagctagttgtggggtggggggaggggggagggatagcattaggagatatacctaatgctaaatgacgagttaatcggtgcagcacaccagcatggcacatgtatacatatgtaactaacctgcacattgtgcacatgtaccctaaaacttaaagtataataataataaaaaaaataaaataagagctagtttgaattagaaagcaacagacaccaggaaaaatcttgtcaggaaaaagaatagatatttgatgagtagcagcattgagttcaccagcagcaggcacctgaaaagacattgcggcgggggttttggccaaaacatgtctgtctgccctctaagcagggtggccttcttacctcatgtatttctgatttgattttctcttttcccacttctggctttggctctcaacaccacagtccaggtcttttgtgctgagggcagaaggcattgagggtggtacactgggatgtatcccatgggctgtgctctggagggcttatctaagaaaaagagtaagaaagtgcctttgagtgttttcatttgaataccttctctccgtaagctgccttcccgtattttttttttcctgctcttatgttctagaaatttttttttcttccaagaagatgaagaaacctgggttcttgtcacagcaagagaattgtctagctgtcatgaagaataagcttagctcttgcttttctgtgctttcctcagactgtaacaacagcagccacagaacttgcaggaccgacattttttgttctcattttttcctttagatatctccacaggaccttcttggttaaatcagggactacttctgaactctacccaatcagtttcaaatttagacctgaccactggtgccaccttaccccagtcaaggtacgtatttttttcagggttagaaaggcaaaccccagagccctgactgtctgtgtaggggtgagccggggtcatgttactgccagcacaggtcctgctgagcaggtttgtggcagatctcaccaatggcacctccttcctgtttttattcctatgttttacaaaactgtttataccacattaatgagcctgtgtgtttttaattgtttgctagtgtaaaccaagggttatgcttggatgcagaagtggccttagcaactgggcagttcctggccccaaacagtcaccagtccagcagtgcggcctctcactgctccgagtcccgaggcgagaccccctgttcgttcaatgatgaagatgaggaagatgatgaggaggattcctcctccccagaataaagacaagagaaagcctacgtttcaatatgtgatgctcatgtgtgtttgtagtgtgagctcttgtttttgaaatgattgcttcagtctttgcctttgtttgcactgtgtgttcagtgaaaactagagaaacacaataagcaaatcacatgaaggctgagatgattgagatgaaagttaacatagtgtgaatgaaagtctggccaacagagcagtagatgatataacaaagaaagcatgctttctgaggagatagtggggataatccctgaagagttggcagtgtgagtgcaactcatttatcttctgtgaggtgggatttttgtgttcctcacacccatgtaattattcttagaattgagattgctacacggagcagtccttgacgatcgtgtttctgacgtttctcttccttgcctggactgcctttgacaaggcagaaatgaacatgaaaagtccccaggagaggggagctgtgtagtgagggatactgagggcagtcctgtggctgaggggcacagattgaactgctgaactagttggaggtctagatgaggtgctttacgcatcagctgccttagacagcttctagaaaggagcgagcgctacttcttaagtacttaagtgacatttagataatttatagtaaaactgaaattattattagccaatgcattggtgcatagaatttactagggctacttctggaagccaaaatagaatagcatttccatgtgcattaaatactttgccagcactgcctttgccagcatcctaaatctggagttttacaaagaaggaaactgtatctttaggttaatcaaagctatgcatttcatatagctttttcatttaaaacaagacaaagaaacaaattcctatgaccaaattgcttgcctacagttccctgcagtaattgtatgatctcacccagtgtgcaatttgtgaaaatgaaccaaatgtcattacttttgtcttaaagaaaagtctatttcaagaatatgaacagcagtgtttccttgtacatgtcaccttttttcacattttcattaatcagaatgaccttattgagcctactcctggggtcaattgcatttcaaactaatccaatatttagtgtttcacagaaacactagaaaacgttgaacactcctactgcctggatatatggtagtgcagttatgttgtttatggctcaagatgtcattagaaatactgcagtggtgtattcacagctgctccttctctgaatgaaagagtgtagggacacctgccaccatggccagaccctgactgaatttcacattaaggctttggaaaggagcaaataataatgggagaattaactccaaaactttgacctgaatcatgtggatttgtcccaagattatgctagatgcaccaagcatggcccaaattggttcttttttaaatcccatgggggaagtgcaggctccttcctgtggtgcctctttatagcctcaccaccatgctaacactgagcatggtgaggaggaggaagctttggctagctaaacatgtttaataaggccataaaaactgagaaagaaaaacattcaactttagctgaagctcctttgatacaaaagtttcattctgtcagaaataagccatagtacagactcagagatagaggcagtttctagagaactcggtcttatcgtgggttctggagcacacctctcagaccagtcaggaacactggggaggtgacagcaggtccccaggggcctgcagggaatctttcagctgcacggattgggatttccctccaaaccaaactgtcctttaaggggcagcctcctcttttactaactccaccctttctcatctctgggacccagcagggacctggagaggccaacagccactgctacctttgtagtcttcaaaatattgaactgcaggtcccaagatgcatttcaggatttaagacaggtgcactaatgataaccattccttcaccaagtagcaacattcttgccagagttcttgggaaacctgtttttttctctactctccatctctgctgctctcatgctttaaattgataaaatatgggctcaaaaaaagaaagccgccaaagactcttatccttattggtgccccatcattggccaccccagccataggtgtgtgctgttggtgggaaatggtctccttcctcagcgttgtgtttgggttactggtgaggccagctcacagagtgacatcatggtcaccagtacatgtcgctggagtaaaatcttgcctttagaaactaggttgagctgttcagaaaggtcaattctcttctgtattccccctcaacatttatctgggtctaaagctcagcactgagtcacaatttcacacaagatcaaagtgaggcagtgttaggaaaccatgggctgggtgcagtgcctctcgcctgtaatcgtagcactttgggaggccgaggcgggcacattgcttgagctcaggagttcaagaccagcctgggcaacatgacaaaaccctgtctctacaaaaatacaaaaattagctgggtgtggtggggcatgcctgtagtcctggctactcaagaggctgaggtgggaggattgcttgagcgcaggaggcggaggttgtagagccaagatcacaccactgcactccagcctgggtgacagagcaagaccctgtctcaaaaaaaaaaaaaaaaaaaaaaatggaagttgtggtcacaatgcccaggcttctttgttatagtggcacgctgggttacttgccacacacagatcactcctcccagggctgctggcacacactgattgtggggagttcaagaggccttttccccttgagggtgtggctgtccccctttcaggcgtgtggcgtcattcatggaggaagtgctggctctacgtagcacacgcacagtggcactaggacctgcgtgcctggccctcagtgggtagggcggtgctgcctaggcacacagcagcgcttacgggccccaggtgcctactaggctgccttcctcttccccgctgtcagtctgtgtcctccacgtgcttatttcctgtggtgagagcagttgtggtgtttgtataccttgtgccttatgatcaaggtgggccttggaggagggcgggaaaggagcgaccaacatggcggtcctccacccctcagcgacacccaccgcccgagaaactacagacaatggccacaagtttggcgtccttcaatttaattctttaaagaagtgctgggaagaaaaagctatgtggtttctaccattttagcaggataaagaggataactccttccattagcaaattttacagttgttaacagtactctgccatatttgaaaaataatgccagagtcagtccttgaaaacaaggtagctcctatcagaattcaaatggaaatttttttttttttttttttttttgagactgagtctcgctctgttgcccaggctggagtgcagtggtgatctcggctcactgcaagctccgcctcccgggttcacgccattctcctgcctcagctgggaccatgcctggctaattttttttgtatttttagtagagacggggtttcaccgtgttagccaggatggtctcgatctcctgaccttatgatccacccctctcggcctcccaaagtgctgggattacaggcgtgagccaccgcacccggcctcaaatggaaatatttcacagaggagtggttcagtttagccctgcaagacatctataacttgactgtttgctaaaccacaactctttttggctacttgggtcatagagacagcagagttgctccaagtataaatgtgacttaggctccctccagcacacagtgtgtatgttggagggagtgtggattagcagagaatgagaactacctcagctattcctgccataaccacactgagagaggggggcacggtggggagcctatttagcttttttttttttttgagacggagtcttgctctgtcgccaggctggagtgtagtggcgcaatcccggctcactgcaacctctgcctcccgggttcaagcgattctcctgcctcagcctcccaagtagctgggattataggcgcatgccgccacacccgactaattttttgtatttttagtagagtcagggtttcaccgtgttgcccaggctggtgtcgaactcctgacctcaggtgatctgcccacctcagcctcccgaagtgctgggattacaggtgtgagccaccgcacccggctctatttagctttttaaaaattatttcctttcaagggccctttaatatctatcaagctccctcccctaacaaaatgggctgtccctgcccaacaagtctgaaatagaccttaaaactgtgctgccttagtggtaagtaaggggtgggggttggacagtgaatcttaagatttcatccttcattcagtaagcatttgagtacctactgtgagcaggcattggggcggagcagcgagagccctgccgatgttgggttctcctcctattggggaaacttgatcacagatggaacacgtgcagattgattgatgagtgctgtggagaaagcagcagcgtagcgggaccgtttgggaaaggctactttggctgggggtggctgggaaaggcccctctgggaaagagacagttttactgagtcagatggtggaaagacagatgtctctatactttcttaacaagccactctgtcccataacatgcacttggaatctctcctaagttccagaggccccactgttccagtttcaagccttcattttggagtctgtttgggaacttttaagacttcaaagcaaagttagctaccagcaatttctgtaaaccaagagaagattgtcacaaagattcactactttccaactgaatctatgcagtagaaaaatcattagaaaatacaaaaattagccgggcgtggtggcacatgcctgtagtcccagctactcgggaggctgaggcaggagaatcacttgaacccaggaggcggaggttgcagtgagccaagatcccgccactgcactccagcccaggtgacagagcaggactctgtctcaaaaaaagaaaaaagaaagaaagaaaaatgattagaaattgagaactattttacgtgtttctaagttgttggctacatcaaagagatcatctgtattctgcatatgggctggctttggtgaagctgatgactggacttctaagaaccgttttcccaaatgggttcccatattcatgcacccaaagcaatggtccccaagcactgatgaaaactaatatgcatttcccaaagacccacactatgtatcaggagcctgcaccatgccatttgaatgaccctcagcaatgtgcctccctgccctcaaattcccagttgataacagtgtttgattaaatttccactcaagccaaacatggttactaagaagagaaaaacctgatgtttgcataatattttttttcccctcgagatggagtcttgctctgttgcccaggctggagtgcagtggcatgatctcagccactgcaacctctgcctcccgggttcaagcgattcttctgcctcagcctcccaagtagttgggattacagacatgtgccaccacgcctggctaatttttgtatttttagtagagacagggtttcaccatgttgaccacactggtcttgaacttctaaccatgtgatctgcctgcctcggcctcccaaagtgctgggattacaggcttgagccaccacgcccagcctaagattttatgattaaaaaaaattcaagctcaatacccacataaattataacgtttctcaggaagtagtcccttaaccaaaacgtctctgagaagtgatgcttaggtaatctctgggatccgattttcccacatgtctcactccacagtatgctaaagaagaaaaagtgagtgggcacaacactttgaccctctggctaagccctgggagtccctgacaggtccagaaacttctctgacacccattcaccagggtgctgagataggagaaagtgctcatttataatgtgtattctgtgcagctgttctcagacaagaccggatcttgtcatcttaccttttgctttacaaaaaaggcctgttgaagtcaatgctgtcttgccccttgctgtttcagcaggttagactttggtcttcactgcttatagctgcattggaggccaacgtagctgatgctcagggtcaggcctcgccccttcgccgcaggtctcaggatcggggataacatcgctcccaccctgctcatttagagatgggaaacaagcaagagcttgacttgcctcccatccctcagcctgtctgtggcagagcctgcaccaaaacccagagcttcttccctccgtgagggccacgctgtcaccacagtcctcccagatgggttttggattagcatcagtcctgtgtcaccaagtgccaaacagctgaggggtagaagtgggactcctttcccgagccccagcatgaggctgtggtgtcaggtttaggcctctctcaagtcagaaaaccccgggctgagacctccacagacaagggctccccatgctggccattggcaggggcccaagaagttcagtgaccaactggtccttccacaccacaccagctggtgctgcccatgtctgtcgaatcataacggaaaattccccagatcacgtttggatttaaaaactcatcccttgtcgtgcttcaatgcatgccatttgtcacttaccatacttcaccatggccgagcttcatgtcacatggcctggcgattgtgcttgttcacactggggccaggattttcatactaaaacgtcactgacaatggggctacttttctcctgaatagctcctctgggcttgttgcagttctagttttcccagtagttccatggcaggttcaacctctcagtgtcctgaaaaatggaaccacccactaaccatatgcactggctgcccaggtggctgcactccggggatcacgtttcagtactgagttccttcacgcacttggttcaccaccatcactcttgagttttggacaaaagaggtgggtatgccaggcacagtggctcacgcctgtgatcccagcactttgggaggccgaggcgggcggatcacctgaggtcgggagttcgaaaccagcctgaccaacatggagaaaccctgtctctactaaaaatataaaattagccgggtgtggtggcgcatgcctgtaatcccagctactcgggaggctgaggcaggagaatctcttgaacccaggaggcaaaagttgcaatgagctgagatcgtgccatttgcactccagcctgggcaacaagagcgaaattccatctcaaaaaaaaaaggtgggtaaagggccatgagcccaaaccactaggttgttcaccttttcatctgaaaatgctttactctgactatgtgctattgggttttatttccagaaaatatagttctccttttttctgcatgaaggatacatcgtggtgccacatgctttaagcaatttaaacaagagagataagaggaaaatgcaaccaccacatctgacttgcccaatgtagactttcctttattagattgaagtacacaacctaatatgatatattattttgtagtatctcagactttgtaaataaataccattatttttatatggaaattttatagaagagctatttctgtatacgtaattactcctgattttctgaaattgcttctggtagataacagacaagtcctaagcagtgttccactaagggtggttccaggcctgcctgccgtggagttgactgggggaattttacagttttgcgatcctaggatgcgtcccagacgctcagtcagaagtgctggaggtggggcctgggaagctgtatttgtaatgaactctggtgttttttgtccattaaagtgtatctttgtccatcctataagattaaaggaaagaaaaagcatctcaaatgagtgtaagttgttcttgagaaaaaaatgtatcagacttttatgatttgaatgaaatgtattatagaaaaaaataaacactttaaaataatgttagtctcattactagtgggtcaggatatttttagttaaaaaaggaggtgttaggccatgcgcagtggctcacgcctataaccccagcactttgggaggccaaggtggtcgtatcatttgaggtcaggagttcaagactagcctggccaacatggtgagatcccgtcaccactaaaactacaaaaatgagcttgggtgtggtggcatgcgcctgtaatcccagcaacttggcgcaggagaatcgcttgaacctgggaggccggaagttgcagtgagctgagatcacaccactgcagtccagcctgggcaacagagtgagactccatctcaaaaaaaaaaaaaaagccttttttttgtttttgtttgtgagatggagtctctgtnnnnnnnnnnnnnnnnnnnnnnnnnnnnnnnnnnnnnnnnnnnnnnnnnnnnnnnnnnnnnnnnnnnnnnnnnnnnnnnnnnnnnnnnnnnnnnnnnnnnnnnnnnnnnnnnnnnnnnnnnnnnnnnnnnnnnnnnnnnnnnnnnnnnnnnnnnnnnnnnnnnnnnnnnnnnnnnnnnnnnnnnnnnnnnnnnnnnnnnnnnnnnnnnnnnnnnnnnnnnnnnnnnnnnnnnnnnnnnnnnnnnnnnnnnnnnnnnnnnnnnnnnnnnnnnnnnnnnnnnnnnnnnnnnnnnnnnnnnnnnnnnnnnnnnnnnnnnnnnnnnnnnnnnnnnnnnnnnnnnnnnnnnnnnnnnnnnnnnnnnnnnnnnnnnnnnnnnnnnnnnnnnnnnnnnnnnnnnnnnnnnnnnnnnnnnnnnnnnnnnnnnnnnnnnnnnnnnnnnnnnnnnnnnnnnnnnnnnnnnnnnnnnnnnnnnnnnnnnactgataaaaaagaacaataggccgggtgcaatggctcatacctataatcccagcactttgggaggctgaggtggtcggatcacttgaggcccggagttcgagcccagcttggccaacatggtgaaacccagtctctactaaaaatacaaaaaattagccaggtgtggtggcggtcgcctgtaatcccagctactcgggaggctgaggcaggagaattgcttgaactcaggaggcagaggctacagtgagccaagatcgcgccatcgcactccagcctgggcaacaagagcgaaactccatctcaaaaaaaaagaaaaatgaacaataaaataatggtgggctgttcgggtgagggtagtgggtactctggggctctgccagagagtaaggactgagaccctctttcaacatctgagttcctcttcatgaattgccctcagaagggtggccagggccgggcgcggtggctcacacctgtaatcccaacactgggaggccgaggtgggcggatcacaaggtcaggagatcgagaccatcctggctaacatggtgaaaccctgtttccactaaaaatacaaaaaataggccaggcgcagtggctcacgcctgtaatcccagcactttgggaggccgaggcgggcggatcacgaggtcaggagatcaagaccatcctggctaacacggtgaaaccccgtctctactaaaaatacaaaaaaattagccaggtgtggtgacgggcgcctgtagtcccagctacttgggaggctgaggcaggagaatggtgtgaacctgggaggtggagattgccccactgcactccagcctgggtgacagagcgagactccgtctcaaaaaaaaaaaaaaaaaaattagccgggcatggtggcgggctcctgtggtcccagctactcgggaggctgaggcaggagaatggcatgaacccaggaggcggagcttgcagctagccgagatagtgccactgcactccagcctgggtgacagagcaagactctgtctgaaaaaaaaaaaaagaagaagggtggccaggtgccgtggcttacccctgtaatcttagcactttgggaggctaggcccagaattgcttccctgcaattcgtagggaagatgctttcttatcatctcttacaccaaaccagcatcagcgagaacagcgacagcagtcaatatagaatgccatgtccccaggcctcaggtggaatgtcacctgacctccggaacatagcagcccctcagcacctgatcacgcagtctctacctgtctcagggagaggccggaaccctagatagcttatctcctatgttccaacaagttgagcacgtggacaatcagaaggcacagaagggtgtggagcagttcaggggccagcaagtagacccaggtcttgaaaaggagatggctaagtaagcactcgatgacatattggaaggaatgcatcttcccataaagactccccctggagtttcacagaccaaataagggtggcggtggtggggaagtggtgagcctgtgctcaagccccttaccccaggggtctcctggagtagtgagccaagctggtattgtgccttctccgttcctcccggcctggaggagccacttactagtgccgtttggtgaaggtgtccaaggactcatgggagtaaccactgtatcacttgggcttaagaaggtgcttttgttcttgtagccacatgggggatggcacagcgactgaatacaccgctgaccaggggcgatacctgcaagcccacagaattgtctacgaagagacaaactattttcaaaaatatttaaagagatttattccgagccaaatatgagtgaccatggcccctgacacagccctcaggaggtccaagaacatgtgtgcaaggtggtcagggtgcagcttggttttatacattttagggagacatgagacttcaatcaagtatgtttaaaaaatacgttggttcggtccagaaaggtgggacaactcgaaggtggggggcgcttccggcttataggtagatttacaaattttcttgttgacaattggttgagtttatctaaaaacctggaatcaatagaaaggaaatgtctgggttaagataagggattatggagagaaaaggtcgcaggcttcagagaatagatggtaaatgattcttatcagtaaggtcggtgttgatgttaatgccagcgggtataatgaggcacttcccgttcctggccggaaccggtctctgaggttacattttaagagcgccctggccaaggagaaagtccattcagatggttggggggtgggacttagaactgtatttttggttgacggagttaattccatgcccagcttcttgagcctcagagagaagacagcttcaacccagagccttttccagaagaaagaacc

SEQ ID NO: 2366 - DNA, 3171 bp, Homo sapiens
agctcgcgcgggggaagcggggctgtagctgggcagggagagggcggacgaaatcggtagcgatctcggctgcggcgctgccgcagctgcccggcccgcggggcgcgccctgacccttcatctttgggcaggctcgagggcgcgcgcacggttggcgttctggggcctcaaactcctgggccttgaccgggcaggccgcgtctccccgggtgtgagtccaccgggacccggccgccgcctaagcgcgggcgccacagaagcggcggcgcccgaagacgcgctcctggctcggcccgacagcctcgcttggccgccagttcttctgcagccgaaggcggttgttcttttaaagaattattgaagacgaaggtttttttctttttatttttttaatggctttacagaatcttaaatagaatacagtttgacatgacggcaaaaaatgttggtttgacttccacaaatgcagaagtaagaggatttatagatcagaatctcagtccaacaaaaggtaaatacctagaagtggaattgctgggtcatatggcaacatttcatttgttgcatttccagtttccaataccaactcacctacaaagattttaccaaaaaccttaggaccaataaatgtgaatgttggaccccaaatgattataagcacaccacagagactaaccagttcaggaagtgttctgattgggagtccatatacccctgcaccagcaatggttactcagacacacatagcagaagctactggctgggtccctggtgatagaaaacgggctagaaaatttatagactctgatttttcagaaagtaaacgaagcaaaaaaggagataaaaatgggaaaggcttgagacacttttcaatgaaagtgtgtgagaaagttcaacgaaaaggtacaacatcgtacaatgaagtcgctgatgagctggtgtcagagttcaccaattcaaataaccatttggctgctgattcggcttatgatcagaagaacattaggcgaagagtttatgatgctttaaatgtgctaatggcaatgaacataatttcaaaggaaaaaaaagaaatcaagtggattggcctgcctaccaattctgctcaggaatgtcagaatctggagatagagaagcagaggcggatagaacggataaagcagaagcgggcccagctgcaagaacttctcctacagcaaatcgctttcaaaaacctggtacagagaaatcgacaaaatgagcagcaaaaccagggcccgccggctctgaactctaccattcagctgccattcataatcatcaatacaagcagaaaaacagtcatagattgcagcatctccagtgacaagtttgagtatcttttcaattttgacaacacctttgagatccatgatgacatagaagtactaaagcggatgggaatgtcgtttggcctggagtcaggcaaatgctctctggaggatctgaaacttgcgaaatccctggtgccaaaggctttagaaggttatatcacagatatctccacaggaccttcttggttaaatcagggactacttctgaactctacccaatcagtttcaaatttagacctgaccactggtgccaccttaccccagtcaagtgtaaaccaagggttatgcttggatgcagaagtggccttagcaactgggcagttcctggccccaaacagtcaccagtccagcagtgcggcctctcactgctccgagtcccgaggcgagaccccctgttcgttcaatgatgaagatgaggaagatgatgaggaggattcctcctccccagaataaagacaagagaaagcctacgtttcaatatgtgatgctcatgtgtgtttgtagtgtgagctcttgtttttgaaatgattgcttcagtctttgcctttgtttgcactgtgtgttcagtgaaaactagagaaacacaataagcaaatcacatgaaggctgagatgattgagatgaaagttaacatagtgtgaatgaaagtctggccaacagagcagtagatgatataacaaagaaagcatgctttctgaggagatagtggggataatccctgaagagttggcagtgtgagtgcaactcatttatcttctgtgaggtgggatttttgtgttcctcacacccatgtaattattcttagaattgagattgctacacggagcagtccttgacgatcgtgtttctgacgtttctcttccttgcctggactgcctttgacaaggcagaaatgaacatgaaaagtccccaggagaggggagctgtgtagtgagggatactgagggcagtcctgtggctgaggggcacagattgaactgctgaactagttggaggtctagatgaggtgctttacgcatcagctgccttagacagcttctagaaaggagcgagcgctacttcttaagtacttaagtgacatttagataatttatagtaaaactgaaattattattagccaatgcattggtgcatagaatttactagggctacttctggaagccaaaatagaatagcatttccatgtgcattaaatactttgccagcactgcctttgccagcatcctaaatctggagttttacaaagaaggaaactgtatctttaggttaatcaaagctatgcatttcatatagctttttcatttaaaacaagacaaagaaacaaattcctatgaccaaattgcttgcctacagttccctgcagtaattgtatgatctcacccagtgtgcaatttgtgaaaatgaaccaaatgtcattacttttgtcttaaagaaaagtctatttcaagaatatgaacagcagtgtttccttgtacatgtcaccttttttcacattttcattaatcagaatgaccttattgagcctactcctggggtcaattgcatttcaaactaatccaatatttagtgtttcacagaaacactagaaaacgttgaacactcctactgcctggatatatggtagtgcagttatgttgtttatggctcaagatgtcattagaaatactgcagtggtgtattcacagctgctccttctctgaatgaaagagtgtagggacacctgccaccatggccagaccctgactgaatttcacattaaggctttggaaaggagcaaataataatgggagaattaactccaaaactttgacctgaatca

SEQ ID NO: 2367 - protein, 383 aa, Homo sapiens
MIISTPQRLTSSGSVLIGSPYTPAPAMVTQTHIAEATGWVPGDRKRARKFIDSDFSESKRSKKGDKNGKGLRHFSMKVCEKVQRKGTTSYNEVADELVSEFTNSNNHLAADSAYDQKNIRRRVYDALNVLMAMNIISKEKKEIKWIGLPTNSAQECQNLEIEKQRRIERIKQKRAQLQELLLQQIAFKNLVQRNRQNEQQNQGPPALNSTIQLPFIIINTSRKTVIDCSISSDKFEYLFNFDNTFEIHDDIEVLKRMGMSFGLESGKCSLEDLKLAKSLVPKALEGYITDISTGPSWLNQGLLLNSTQSVSNLDLTTGATLPQSSVNQGLCLDAEVATGQFLAPNSHQSSSAASHCSESRGETPCSFNDEDEEDDEEDSSSPE

SEQ ID NO: 2368 - DNA, 2710 bp, Homo sapiens
agtctcaagtttccactgaatggtaacaaagactgtagaatgttgttggtactgcagtgagaggcatgcttccttagaccaggcaacatttcatttgttgcatttccagtttccaataccaactcacctacaaagattttaccaaaaaccttaggaccaataaatgtgaatgttggaccccaaatgattataagcacaccacagagactaaccagttcaggaagtgttctgattgggagtccatatacccctgcaccagcaatggttactcagacacacatagcagaagctactggctgggtccctggtgatagaaaacgggctagaaaatttatagactctgatttttcagaaagtaaacgaagcaaaaaaggagataaaaatgggaaaggcttgagacacttttcaatgaaagtgtgtgagaaagttcaacgaaaaggtacaacatcgtacaatgaagtcgctgatgagctggtgtcagagttcaccaattcaaataaccatttggctgctgattcgcaggcttatgatcagaagaacattaggcgaagagtttatgatgctttaaatgtgctaatggcaatgaacataatttcaaaggaaaaaaaagaaatcaagtggattggcctgcctaccaattctgctcaggaatgtcagaatctggagatagagaagcagaggcggatagaacggataaagcagaagcgggcccagctgcaagaacttctcctacagcaaatcgctttcaaaaacctggtacagagaaatcgacaaaatgagcagcaaaaccagggcccgccggctctgaactctaccattcagctgccattcataatcatcaatacaagcagaaaaacagtcatagattgcagcatctccagtgacaagtttgagtatcttttcaattttgacaacacctttgagatccatgatgacatagaagtactaaagcggatgggaatgtcgtttggcctggagtcaggcaaatgctctctggaggatctgaaacttgcgaaatccctggtgccaaaggctttagaaggttatatcacagatatctccacaggaccttcttggttaaatcagggactacttctgaactctacccaatcagtttcaaatttagacctgaccactggtgccaccttaccccagtcaagtgtaaaccaagggttatgcttggatgcagaagtggccttagcaactgggcagttcctggccccaaacagtcaccagtccagcagtgcggcctctcactgctccgagtcccgaggcgagaccccctgttcgttcaatgatgaagatgaggaagatgatgaggaggattcctcctccccagaataaagacaagagaaagcctacgtttcaatatgtgatgctcatgtgtgtttgtagtgtgagctcttgtttttgaaatgattgcttcagtctttgcctttgtttgcactgtgtgttcagtgaaaactagagaaacacaataagcaaatcacatgaaggctgagatgattgagatgaaagttaacatagtgtgaatgaaagtctggccaacagagcagtagatgatataacaaagaaagcatgctttctgaggagatagtggggataatccctgaagagttggcagtgtgagtgcaactcatttatcttctgtgaggtgggatttttgtgttcctcacacccatgtaattattcttagaattgagattgctacacggagcagtccttgacgatcgtgtttctgacgtttctcttccttgcctggactgcctttgacaaggcagaaatgaacatgaaaagtccccaggagaggggagctgtgtagtgagggatactgagggcagtcctgtggctgaggggcacagattgaactgctgaactagttggaggtctagatgaggtgctttacgcatcagctgccttagacagcttctagaaaggagcgagcgctacttcttaagtacttaagtgacatttagataatttatagtaaaactgaaattattattagccaatgcattggtgcatagaatttactagggctacttctggaagccaaaatagaatagcatttccatgtgcattaaatactttgccagcactgcctttgccagcatcctaaatctggagttttacaaagaaggaaactgtatctttaggttaatcaaagctatgcatttcatatagctttttcatttaaaacaagacaaagaaacaaattcctatgaccaaattgcttgcctacagttccctgcagtaattgtatgatctcacccagtgtgcaatttgtgaaaatgaaccaaatgtcattacttttgtcttaaagaaaagtctatttcaagaatatgaacagcagtgtttccttgtacatgtcaccttttttcacattttcattaatcagaatgaccttattgagcctactcctggggtcaattgcatttcaaactaatccaatatttagtgtttcacagaaacactagaaaacgttgaacactcctactgcctggatatatggtagtgcagttatgttgtttatggctcaagatgtcattagaaatactgcagtggtgtattcacagctgctccttctctgaatgaaagagtgtagggacacctgccaccatggccagaccctgactgaatttcacattaaggctttggaaaggagcaaataataatgggagaattaactccaaaactttgacctgaatca

SEQ ID NO: 2369 - protein, 384 aa, Homo sapiens
MIISTPQRLTSSGSVLIGSPYTPAPAMVTQTHIAEATGWVPGDRKRARKFIDSDFSESKRSKKGDKNGKGLRHFSMKVCEKVQRKGTTSYNEVADELVSEFTNSNNHLAADSQAYDQKNIRRRVYDALNVLMAMNIISKEKKEIKWIGLPTNSAQECQNLEIEKQRRIERIKQKRAQLQELLLQQIAFKNLVQRNRQNEQQNQGPPALNSTIQLPFIIINTSRKTVIDCSISSDKFEYLFNFDNTFEIHDDIEVLKRMGMSFGLESGKCSLEDLKLAKSLVPKALEGYITDISTGPSWLNQGLLLNSTQSVSNLDLTTGATLPQSSVNQGLCLDAEVATGQFLAPNSHQSSSAASHCSESRGETPCSFNDEDEEDDEEDSSSPE

SEQ ID NO: 2370 - DNA, 2923 bp, Homo sapiens
agctcgcgcgggggaagcggggctgtagctgggcagggagagggcggacgaaatcggtagcgatctcggctgcggcgctgccgcagctgcccggcccgcggggcgcgccctgacccttcatctttgggcaggctcgagggcgcgcgcacggttggcgttctggggcctcaaactcctgggccttgaccgggcaggccgcgtctccccgggtgtgagtccaccgggacccggccgccgcctaagcgcgggcgccacagaagcggcggcgcccgaagacgcgctcctggctcggcccgacagcctcgcttggccgccagttcttctgcagccgaaggcggttgttcttttaaagaattattgaagacgaaggtttttttctttttatttttttaatggctttacagaatcttaaatagaatacagtttgacatgacggcaaaaaatgttggtttgacttccacaaatgcagaagtaagaggatttatagatcagaatctcagtccaacaaaaggcaacatttcatttgttgcatttccagtttccaataccaactcacctacaaagattttaccaaaaaccttaggaccaataaatgtgaatgttggaccccaaatgattataagcacaccacagagactaaccagttcaggaagtgttctgattgggagtccatatacccctgcaccagcaatggttactcagacacacatagcagaagctactggctgggtccctggtgatagaaaacgggctagaaaatttatagactctgatttttcagaaagtaaacgaagcaaaaaaggagataaaaatgggaaaggcttgagacacttttcaatgaaagtgtgtgagaaagttcaacgaaaaggtacaacatcgtacaatgaagtcgctgatgagctggtgtcagagttcaccaattcaaataaccatttggctgctgattcggcttatgatcagaagaacattaggcgaagagtttatgatgctttaaatgtgctaatggcaatgaacataatttcaaaggaaaaaaaagaaatcaagtggattggcctgcctaccaattctgctcaggaatgtcagaatctggaggtaaagaagcagaggcggatagaacggataaagcagaagcgggcccagctgcaagaacttctcctacagcaaatcgctttcaaaaacctggtacagagaaatcgacaaaatgagcagcaaaaccagggcccgccggctctgaactctaccattcagctgccattcataatcatcaatacaagcagaaaaacagtcatagattgcagcatctccagtgacaagtttgagtatcttttcaattttgacaacacctttgagatccatgatgacatagaagtactaaagcggatgggaatgtcgtttggcctggagtcaggcaaatgctctctggaggatctgaaacttgcgaaatccctggtgccaaaggctttagaaggttatatcacagatatctccacaggaccttcttggttaaatcagggactacttctgaactctacccaatcagtttcaaatttagacctgaccactggtgccaccttaccccagtcaagtgtaaaccaagggttatgcttggatgcagaagtggccttagcaactgggcagttcctggccccaaacagtcaccagtccagcagtgcggcctctcactgctccgagtcccgaggcgagaccccctgttcgttcaatgatgaagatgaggaagatgatgaggaggattcctcctccccagaataaagacaagagaaagcctacgtttcaatatgtgatgctcatgtgtgtttgtagtgtgagctcttgtttttgaaatgattgcttcagtctttgcctttgtttgcactgtgtgttcagtgaaaactagagaaacacaataagcaaatcacatgaaggctgagatgattgagatgaaagttaacatagtgtgaatgaaagtctggccaacagagcagtagatgatataacaaagaaagcatgctttctgaggagatagggagctgtgtagtgagggatactgagggcagtcctgtggctgaggggcacagattgaactgctgaactagttggaggtctagatgaggtgctttacgcatcagctgccttagacagcttctagaaaggagcgagcgctacttcttaagtacttaagtgacatttagataatttatagtaaaactgaaattattattagccaatgcattggtgcatagaatttactagggctacttctggaagccaaaatagaatagcatttccatgtgcattaaatactttgccagcactgcctttgccagcatcctaaatctggagttttacaaagaaggaaactgtatctttaggttaatcaaagctatgcatttcatatagctttttcatttaaaacaagacaaagaaacaaattcctatgaccaaattgcttgcctacagttccctgcagtaattgtatgatctcacccagtgtgcaatttgtgaaaatgaaccaaatgtcattacttttgtcttaaagaaaagtctatttcaagaatatgaacagcagtgtttccttgtacatgtcaccttttttcacattttcattaatcagaatgaccttattgagcctactcctggggtcaattgcatttcaaactaatccaatatttagtgtttcacagaaacactagaaaacgttgaacactcctactgcctggatatatggtagtgcagttatgttgtttatggctcaagatgtcattagaaatactgcagtggtgtattcacagctgctccttctctgaatgaaagagtgtagggacacctgccaccatggccagaccctgactgaatttcacattaaggctttggaaaggagcaaataataatgggagaattaactccaaaactttgacctgaatca

SEQ ID NO: 2371 - protein, 444 aa, Homo sapiens
MTAKNVGLTSTNAEVRGFIDQNLSPTKGNISFVAFPVSNTNSPTKILPKTLGPINVNVGPQMIISTPQRLTSSGSVLIGSPYTPAPAMVTQTHIAEATGWVPGDRKRARKFIDSDFSESKRSKKGDKNGKGLRHFSMKVCEKVQRKGTTSYNEVADELVSEFTNSNNHLAADSAYDQKNIRRRVYDALNVLMAMNIISKEKKEIKWIGLPTNSAQECQNLEVKKQRRIERIKQKRAQLQELLLQQIAFKNLVQRNRQNEQQNQGPPALNSTIQLPFIIINTSRKTVIDCSISSDKFEYLFNFDNTFEIHDDIEVLKRMGMSFGLESGKCSLEDLKLAKSLVPKALEGYITDISTGPSWLNQGLLLNSTQSVSNLDLTTGATLPQSSVNQGLCLDAEVATGQFLAPNSHQSSSAASHCSESRGETPCSFNDEDEEDDEEDSSSPE

SEQ ID NO: 2372 - DNA, 3026 bp, Homo sapiens
agctcgcgcgggggaagcggggctgtagctgggcagggagagggcggacgaaatcggtagcgatctcggctgcggcgctgccgcagctgcccggcccgcggggcgcgccctgacccttcatctttgggcaggctcgagggcgcgcgcacggttggcgttctggggcctcaaactcctgggccttgaccgggcaggccgcgtctccccgggtgtgagtccaccgggacccggccgccgcctaagcgcgggcgccacagaagcggcggcgcccgaagacgcgctcctggctcggcccgacagcctcgcttggccgccagttcttctgcagccgaaggcggttgttcttttaaagaattattgaagacgaaggtttttttctttttatttttttaatggctttacagaatcttaaatagaatacagtttgacatgacggcaaaaaatgttggtttgacttccacaaatgcagaagtaagaggatttatagatcagaatctcagtccaacaaaaggcaacatttcatttgttgcatttccagtttccaataccaactcacctacaaagattttaccaaaaaccttaggaccaataaatgtgaatgttggaccccaaatggatgcaaccagaaggcatcatctttgaagcagagaataaaccctcaccaggcactgaatctgccggcactttcattttggacctctcagcaacctccagaacaattataagcacaccacagagactaaccagttcaggaagtgttctgattgggagtccatatacccctgcaccagcaatggttactcagacacacatagcagaagctactggctgggtccctggtgatagaaaacgggctagaaaatttatagactctgatttttcagaaagtaaacgaagcaaaaaaggagataaaaatgggaaaggcttgagacacttttcaatgaaagtgtgtgagaaagttcaacgaaaaggtacaacatcgtacaatgaagtcgctgatgagctggtgtcagagttcaccaattcaaataaccatttggctgctgattcggcttatgatcagaagaacattaggcgaagagtttatgatgctttaaatgtgctaatggcaatgaacataatttcaaaggaaaaaaaagaaatcaagtggattggcctgcctaccaattctgctcaggaatgtcagaatctggaggtaaagaagcagaggcggatagaacggataaagcagaagcgggcccagctgcaagaacttctcctacagcaaatcgctttcaaaaacctggtacagagaaatcgacaaaatgagcagcaaaaccagggcccgccggctctgaactctaccattcagctgccattcataatcatcaatacaagcagaaaaacagtcatagattgcagcatctccagtgacaagtttgagtatcttttcaattttgacaacacctttgagatccatgatgacatagaagtactaaagcggatgggaatgtcgtttggcctggagtcaggcaaatgctctctggaggatctgaaacttgcgaaatccctggtgccaaaggctttagaaggttatatcacagatatctccacaggaccttcttggttaaatcagggactacttctgaactctacccaatcagtttcaaatttagacctgaccactggtgccaccttaccccagtcaagtgtaaaccaagggttatgcttggatgcagaagtggccttagcaactgggcagttcctggccccaaacagtcaccagtccagcagtgcggcctctcactgctccgagtcccgaggcgagaccccctgttcgttcaatgatgaagatgaggaagatgatgaggaggattcctcctccccagaataaagacaagagaaagcctacgtttcaatatgtgatgctcatgtgtgtttgtagtgtgagctcttgtttttgaaatgattgcttcagtctttgcctttgtttgcactgtgtgttcagtgaaaactagagaaacacaataagcaaatcacatgaaggctgagatgattgagatgaaagttaacatagtgtgaatgaaagtctggccaacagagcagtagatgatataacaaagaaagcatgctttctgaggagatagggagctgtgtagtgagggatactgagggcagtcctgtggctgaggggcacagattgaactgctgaactagttggaggtctagatgaggtgctttacgcatcagctgccttagacagcttctagaaaggagcgagcgctacttcttaagtacttaagtgacatttagataatttatagtaaaactgaaattattattagccaatgcattggtgcatagaatttactagggctacttctggaagccaaaatagaatagcatttccatgtgcattaaatactttgccagcactgcctttgccagcatcctaaatctggagttttacaaagaaggaaactgtatctttaggttaatcaaagctatgcatttcatatagctttttcatttaaaacaagacaaagaaacaaattcctatgaccaaattgcttgcctacagttccctgcagtaattgtatgatctcacccagtgtgcaatttgtgaaaatgaaccaaatgtcattacttttgtcttaaagaaaagtctatttcaagaatatgaacagcagtgtttccttgtacatgtcaccttttttcacattttcattaatcagaatgaccttattgagcctactcctggggtcaattgcatttcaaactaatccaatatttagtgtttcacagaaacactagaaaacgttgaacactcctactgcctggatatatggtagtgcagttatgttgtttatggctcaagatgtcattagaaatactgcagtggtgtattcacagctgctccttctctgaatgaaagagtgtagggacacctgccaccatggccagaccctgactgaatttcacattaaggctttggaaaggagcaaataataatgggagaattaactccaaaactttgacctgaatca

SEQ ID NO: 2373 - protein, 422 aa, Homo sapiens
MLDPKWMQPEGIIFEAENKPSPGTESAGTFILDLSATSRTIISTPQRLTSSGSVLIGSPYTPAPAMVTQTHIAEATGWVPGDRKRARKFIDSDFSESKRSKKGDKNGKGLRHFSMKVCEKVQRKGTTSYNEVADELVSEFTNSNNHLAADSAYDQKNIRRRVYDALNVLMAMNIISKEKKEIKWIGLPTNSAQECQNLEVKKQRRIERIKQKRAQLQELLLQQIAFKNLVQRNRQNEQQNQGPPALNSTIQLPFIIINTSRKTVIDCSISSDKFEYLFNFDNTFEIHDDIEVLKRMGMSFGLESGKCSLEDLKLAKSLVPKALEGYITDISTGPSWLNQGLLLNSTQSVSNLDLTTGATLPQSSVNQGLCLDAEVATGQFLAPNSHQSSSAASHCSESRGETPCSFNDEDEEDDEEDSSSPE

SEQ ID NO: 2374 - DNA, 90663 bp, Mus musculus
  misc_feature (1)...(90663): n = A, C, G or T/U
cccaaccttctgctgtcaccttcccaagtccccacctcattttagccctaagcagcaactccattttcttctccataatttccctattctggaatctcatgtatggcacagtatatcactaaaggctcaagctagaattctcccaaccagctctgcagagacagtgatgcaagtgagggcatgggctgggaggccaatgcaaaccatttcttggctgcaaataagaacactgagccacaatggcttacatgacagagacatgctgtcttgtcatcttgacaggatagattagtctgacattggaccatggagtcaaacaagagagggaagacaagagaatgaaggccaagaaaaacgtgaccctgtgtattttacaagatccccagaaaccttcaactgccatgttctagttacagggaagatgctgttagatcacagagcaagaagggaggaactggaatatgggaactcatagaaccaggcacgggagagcagtttggcaccgtgatcagatgatcagatgagagatgcactgcaggcagtaagttagacactcgaatgtgggtgttgtcctcactaacattgtcacgatggtaaagcatgaaaagtggagaaaaaaaaaacccacaacgatggaaattcatttccgactcatgaatacatttgtttaacatgaaaggtcaaagagatgaaacctagactccattaaggaaagtgaccacatacaaagttaatatatggctcaattatatacatgtatttcgcttaaagtcaaaagaccaatgtcagagtgtgcaaagggtatatttgtaatagatatcttatgtgtgcccaaatatccttgacatcgaaaagtacctacaaactagtaagaggcaagcaaggccacagaaagataatgaaaggatgagaagtaaaagcccacaaagaagacatgcaaatgttctccaaacggacaacaacaacaaacaaacaaacaataacaaaacctgttcacattcacctatgctgacttgggtagagcttccgattcaaactctcctataatattaacacatggtgagagcttccggacccaggccctttccttacctgcatatgaactcacgaactcacttaattccaccgagacgctaatgggtgggactttattatcttagcttgacaggtgtgaaaagtatcaaaactctcgggcatgaaaacatagccaagacattagtcggcaggtaacaggctcaaccttggtgagtttggcttcagagcccgtgggctcaagtgctagatgggagtccagccaggaaaatgtcacattgctcatcagattcataagattaaaagaatgacaatatccagtagtgacatctagagcaaaagggaagaccgtaacacaccttggcaggtggagtgtgacttatttctaatttgagggaaattatctacttaaaatttaagatatgtgaaatgaaaaatgatcattctcaccttgaacggtgtatacaatagaaattaaaacatgaaaatagaaacaaaacatgattgttttgacagaatgacttttttcttagctcctagaaataaacctatttgtttctcagttgtgactgttacatgacatgtgatcagccaaaccaagagttattattctcaatgtcagccttggtccattaccatagttttgtgggttggagaggaggctctgtggttaccagcaatggctgctcttccataggatcctgactcaattcccagcacccacatggtagctcacaaacatctgttaactccagttacaaggggatccgaaaacctcttctgacctctgcaggcaccaggcaacacaagtggtacatagatgtatatacaaacaaaacacccatacatataaaataaataaaaactaaaattaaaaattttatttcagtttttatataaatttgcaataaatttcatctcttctgtcaacagaaagacattattacattgtttcttataaacaaaagggttatttttcctgttctttttttttttttaagtttaaaaaaatttttttttcaagacaagcttttactctgtagaccagaatgttctggaactcactatgtagatcaggctggccttgtaattgtgacaatccttctgccttccaagccactagtcacccagatattggcataaaataataaacatgacaacacaataatgtatttggagttagcactacctacagaaagttataatcctgagctaagctttccacacagcagtgagatctcaggcaggtaccattttattctgtctctttactgcctgttgtggatgtcctcactccacagcgatgagcctcccagtgttctggaaacacatgaaaatcgctcatctttaatctgaagagacagtcactcagtgaaacgtaaaactgttgggaagtgttgttgactctgacaaagaccctgtagtatgtgcaccgacactgcttcagtatgtgcacagacgaggtggacttcttagccaaagaaaacagccatgttggtctaagtggtctccagttggcatcttaatatagttcaatgtagcaaactctcaaggatgccaacttgaattaccgaaagggatgaggaaatataagttattttactgcttttatttgagagtatggattactggattacttttgaatttttaaaacaattttgttgtttgttagttgggtttatgtttttgtttttgttttgaggcagggtttctctgtgtagccatggctgtcctggaactcactctgtcgtcctcgaacttagagatgcatttgcttctgtctcccaagtgctgggatgaaggaagggtgtgagcctaactatttgtaagagttcgtaaaaagaattttgttgttgttgttgttttttttttttttttttttttttggttttgttttgttttttgtttttcgagacagaaatccgcctgcctctgcctcccaagagctgggattaaaggcgtgtgccaccacgcctggcaaaagaaatctttaagttcagtctgagccttcataagctacgaagaagccaccagtcttaagtcagggcaaatcacctcctgggggtgggtgggaggggcttggggggaggnnnnnnnnnnnnnnnnnnnnnnnnnnnnnnnnnnnnnnnnnnnnnnnnnnnnnnnnnnnnnnnnnnnnnnnnnnnnnnnnnnnnnnnnnnnnnnnnnnnnnnnnnnnnnnnnnnnnntcagcccctctgacgctgacgtgcctggtcacatgaatctttgctggggatgaccattcctcgcatcagtgcagtggtgttttgcccccgaatgtcgtcaaacattccgcaggggacgaaaatcacctctgcttgagaactgtgaagaaaaaccccagagcactggctctctgctctctccagcgctgacgctgtcaatctgtttataagggctattttcatcaaagccactagagggagcactctgctgtttgagacacaaccagagcagcaggagcaggcggagacgtagtctccatccctgttggctggtctctacttcagacactctggctttaatagtctttcctgttgggactgataacctttcgccttgaggcacgaagcgtcgctggtcttgtgctttcctggtgttttcagacacagcggggagaacataatgatcttggcttttaaaaacattcttcctaaggcagccagatgaatcatccttctaaaaaaagaatttccacgaggggagcctgtggaacatttacactaggaggcaaagaccctagttctctcctccatcctgccagttccaggctgtgtgaagttggtcaagttcctcggcctctctggttttacatataacagagccgaggagtccgagtttaatacatttagtaacttgcctagggtcacttggttgagatgtgtgatcaaatagggatttgaatctgatccatctacttcttgggaaagctgagaacataaaatgggatggggtgtgtgagagtctcagaagatagaaaatcccacaggagttcagtatgacgttgtgcttgtgcgcacattgagggaaccaggagcccagagaagaggggtgtggcttctggtccttcgtgcttgatggaccctgtccctgaaacttgtgtatccccttcatgatagaaatggcaggtatcctccacctcttaggagttacttaaatgattcaataaaagaaaaggatatattccaacacacccacctttgtctttctctctttccttcccctcctgcctttctccctcccttccccttctgtctctctacctgattgttttgctcagcgtggacaatcaaacctaagtcatcgtgtatgcagggtaaacacgattctgctgtaaacagaataccagcataaggactcctaggttgatgggtaaaaattaagagaccagaaataaaatcactaatactatgatcaatcgatttcttacaaagaagtaaagacatgtcaataggggagatagcaaagtgcctttttgttgttgttgttgttttgttttgttttgtttttcaagacagagtttctctgtgtagccttggctgtcctggaactcactctgtagaccaggctggcctcgaactcagaaatctgcctgcctctgcctctgcctctgcctctgcctctgcctctgcctctgcctctgcctctgcctctgcctctgcctctgcctctgcctctgcctctgcctctgcctctgcctcccaagtgctaggattaaaggcgtgtgccaccactgtccggcccaaagtgccttttaagtaaacctgattttaggtcagtttgagaacagtcctttcaataagggatgctgggacaagccgggcatccacactgaaagcagtgaacttggaattccacctcacaccacctaaaaccattcacagagctaagccatctaccgctaaggctgctacgggaaactcaggtgggcgtcttcgtgtccttgggttagacaaaggtttctcaaccacaatgtgaaaggcagctgtgataaaagagagcaagcattggcccttcttcagacacttcttcagaacatagcattcttgtgctgcaggtaacatcaagaatgtggagaaacgtggggctggagtgaccatccaccagttaccagccttgctgatcctacagagtggtcacagcctggatccatattgggaagctgacagcagcatgtaactcccacactagaggatcctacaccctcttctggcctctgtgggccctgcacacaaaggtgcacatacacagatatgcacacatacacataaataataaaaacaacattaaactcttttaaaataaaaatgcatgtgaagggctggagagatggctctggagtttagagcattttcatctcttttgggagacccgaccacagccatctgtaattgcagtcccaacacctgcttttggcttttgagaacatctgtacacacatgatacttactcgtatggacacacatacacatggagagaaaatgataagtatttttaaagcatatgaaggaacaacccacacacaaggagataacgtggacgatgaaggatttagatccagaataaacttaaaatagaaagagcgtctccactcaaagataagaaggtacaatttaagggcagataacggacttagacaattctctagagaaggtatacaaatggccagctacatcattagtcattgggtagaagccacaatgggaccgcatggctcacctacgaggatgactaataaagagacagtaaggggtggtgaggatgggggggaggggggaagatggtgagactggtgccatgggtatgtggaaattagaaacttcacacgtgactggtgggagtgtcaaactgaggtggcattttgcaaaacagtgcaacagttcttcagaaatgttaagcccagagtttccaccccagccatgtcatgacttgaaaatgaaatgtcccttcaggttcaggtgctccaggtttaggtccccagtgggtggcactattttgggaggttctgggaactttaagaggcaggtctcagctggaggaagtaagtcaacgggtgagccctgggcagatcttgttgttgcacgtctcttattctgattcttttaaaatttttacttattatttatctttggtttagtttttgcatgtgtatctgcatggtggtagtgtgtgtgtgtgtgcgtgtgtatacatgtgggggtcatgtgcacatgtgcgagcggacactcgaaagcttatagttggcattgtcttcctcagtcattttccacatcacttgttgattcattgaacctgcagcttgccagtatcaactagtctaaacagccccaaagattcccgtgtctacctcctgagctctggaattacagatggctgccatgcttgcctgacttttgctttgctttgctttgctttgctttgctttgctttgctttgctttgctttgctttgctttgctttgctttgctgttttgttttgttttaacatgggttttaggaatccaaactctggttcttgtgcgtgcgtggcaaacagttgaccaactgagccaccaccccaggctctctctcccttgcctctgctttctgcctgtcccgtgttcttggcacccagatgttacataagtacataggcccaagccaccacgagccaaaccctttgaaacatgagccacaatggatcttttcttacatttttttctatcatatattcatagcaacgataaaagcaactaacacagcacagcgatctttctccttggtatccgtccaagagaaacaaacgcttacgtacgtgcttgctctcatgtgcacacacgcacacacctcccggcaacaataaccttgtacaccaaagtccatggcaatattgtccattacacacctgcaatctcagcaactcaggctgagctctcagttcaaagtcagcctgggacacaaaagaaaggatttttttttttttaatgctggggatatagctcagtggtagaacacttgcctggcttgtgtgagactcttaagttcaatcttctgtattgtacaaagaaagaggtaggagaattcaaactttcaccaactgattcaaagataataaacaaaatgtcttatactcatacagtagaatattcctcagatttaaaaggaataggcatggaaatattctacagcatggacacactctgaaggcaccatgctatgtgaaagaagccaatctggacgggccatatactacataatcccactgtgtgaaccaccacaggagggagatccctagaactggaagggacactggtggttgcccacggctaaaatatacatgtttctcttgggggaaatgtgtgatgaaaatgttgtaaaaatagattatgtgcatacaaatgtgctaaatacatgtaaatatattaaaatccatcaaattaccttttaagtgggtggactttctgctacataacccatatcttaactgtgttttttaagactgaagaaagtgggagaagtcagaggcaaaaagtatagacaggtctgaagaattccttaaaggttttccagaaaattagcaatatacagttatagactatagtcagaaaagaggtttccccagcagggtacaggcaaggagaggtctctgggaaacttctctgtatctctaagggttggtctgctcaattccctggctttatcctctctctctctctctctctctctctctctctctctctccctccctccctccctccctccctcctcctcttccctcccctctccccctgttagcatcaacctcagcatctgcaaagcaaggttctgcagcttgctttagtttacttttgcttttcttttccttctctgtttgccctgtcactaggtacagtggaaaacagtgaaccactagtcttcttattaaagaaataaagactggtgtctgtggagtgggctagaccaccccccctccccgccccctgccccaccctgtccccaggnnnnnnnnnnnnnnnnnnnncccgcgcccctgccccaccctgtccccagggaagcagagcagagaggcaccggtggcacttctgtagacactggctgttatcacttctcctttgatgaagagcattcggggttctcctctgagattatctgctaattccacggatcccaactccactaaacaagcgtgattcccgagaatcacggaacggaaccagaaccgcagagctctcaggaaaaggtgctcaccagaggcaggctctatgagccatggtgagaggtcccatgacctgaacctgccccgcctccagagagaggaaacactatgaaaccacagtcactgatacctaagtctccagtgcctttcctaagggctggaaattcctgacttttgtcttcctcttgaaatgaggcattggagagtcatggaaaagtacaagacagaatcacaagccaccaccgtggagaaggtgccaaggagcccatcctgatggggacccaagtcttgagcagactttcttcctgacacccctgccttggcacttagagcacagcaggggctctcaatgtgatctagcctcatcactattcccagtgggacagagatagcctaagaacggtgctgcttctgttaggctgaggccccttcttgtcctcagaaaacacatttgcttcacctcctcatgtgggccttccagttctccagaacattcctgtgtcctttcccccttagctttccaacctgcccaggcccagccctttaatctcactgctgcacgtggagttcaggaagacaacggcgaggtggccatggcttcctctgaggtgctctgcctgccgtagctctcccaccacactccagagcttcggccactgggcttcccttgctttgtctggctccagtttctcaggacagaccggtcgcttgtcaagcctgtggtattggcccatcaagagcacaggaggcctacctcacctagatagaacatacctgatgggtctgcagtgttcctgtagggttggccaggtttcaagacctttattcttgtctttcctcccctgggaggcgcatcagtcggcagcccttcattcacgccagcctctcaacttggaagctaaaagaggatttgaggtctgacaacccaggctctgccactgattagctgtgagacttaagagacgaatctgagaacccgtttcctcatctatagatgtaggaagcacagctttgtcacaaaaagtgaaatactgacataaagtatttaccgtggagacttaaacattcacagtaagttttcagtatatgccctccacatttattttaaagttttcattcaaccactcactcactcactcactcactcactcactcactcattcattcattcattcattcatagtgtacttagtaagcttcatgccaggtactggggtatgactaggtcttccaagacaaaagccactgagacccaggctgaagagagcagagagctgaggcctgcttccacagcacatggagaagcaaacacgccccaagcactgggggctgcccagggacagtgacagtgagtccatctttcctcgtctttaaataccattaagactctgctaaggtgagagctacaagaaggaagatacgtgataggggaagtgagagggtcctgggggaacccctgttcttccaggcttctcggttacagagagtggtctcaccgtggctgtacaggagggcgatgcccttcagggaggccttgttgaatctgtctgggactgttccggaaggaggaagggaggcgggtggggcggggagacagctggaatgttctggcctgctgttcagcgcagccagcctgcaagagaggagggcctctggacatcaaaggttccttttgtccctttccgagtggcagggcagccgggccactggctatgactcaggcctggccctgacgtcacccacggcttgccactggcctcggtttgcagccaggaacctggccagggagtggttctcatagcggcagcaaatctcaaaaccgggagctcactgctgcgctctccccatctccccacaacccatcttaaccttttttcttcttctttttaagccgtaaggcggccttttcttatagatcaactttccaaatctaagcagtcagaatgagtgacgtcatgagaaaattatgtggagcacatctcaaccaggagttgaggaatccagaggacgaatgcggttggtaactcctgagcccagggagttggcagagtgtgggcttccaaggagccagcacctccgagtaagtgaaggcccacccttagcccctcagtcatggcccagcattatgggcgccatcttgctcctgagagctgggcctggcaggccgagacccagagagggtgtggggacagcctttgggactctttctaaatacagcctcagaggggcctgctctctcttccccacagagccaaacaagagtgcagaagcaaaagctactcagggggaacaccagggaccaggctcctcgttttctctcccaacctgagccctgcttcaagaaggccaaaatgtttgtttgggggtctggactgcttgcttcatggatcttctatggggtgatgagacttaaaagcaagccccattctaggcaaacatatgctgccaaatagtactttcccactttgggggcctgggggaagaatggcaagcctgttaggaagggtcctcagtctgccatgggagcttgttcaccactcaggctgatgcaccttcatcgtctcagggctgtcctggttagggttctttgtttcctcttaacgctgccgcggggaggttaagcgcaaaggtgaaacgtaggttgtctgttttagttttgtctaaaacctcctaggtctaggcaaaacctgtcatttatatgttctagaagtttctactcaggaaatttcagtttctgtgaaaagcattttatgcacatgcatgagaactgcggagcagacaggcatagatatagatttccctctgttcttctggcttctcaagtcacctcccgagtgagcgtctattttctgtgtgttcttcattaatgtatgaagaacagcacactgtctgttcttcatacattaatgtggtttcgggcactataaaaaatggaccttactttaaggcaatgcagaagtttgtcatttaatggaaacacaaattcattgtgaacaaactccctgtgtgattaactatcgcactttaatatatggtttgtaggtcttgtgttttactttttaaatataattttacagaccgagctgtcttgaattgaggccatgacgtcctactgttcctgtggctgaaagagctgagtgctgtgtgacaaatactttggtgagtcgtatatttaagtctctaattctactttttttttaaagttttagaataataaagaaaagggtggtacagggcccagatacttctgcacacaaaggcaacagttgtgtcaaagaggacaaatgtcctgacaggcttattgctattatagaacccaaatatagattggctcaaacacaatagtgtttacctcttggtcatgcgacaatgcaggttagttgggggtaactgtttttcattcattcattcagattcaaggctggggggtatagttcagtgtgagactccttgcccaatgtgtccaagtccctggtttgatcctcaacaaacactaaccgaaacaagaaaatcaaagtttgaaggaggctgcgcgtggttttcaaaagtcacgggtctatctttgctttcctctgtaggaggaacgaagaccgtgaggcgcgtgcgtgggagggtcttatggttggaagttgcacacatcatctttcctcacatctcattggctaagtccaagacacatgactatagctaactagagagagctgctgctcctcagagacaaccggggagaattgctgggaaaatggtaattttctttgacattgaatgtaaaaacttggaaacactcaaatataaagctgtagagtagaagtgatgtgtgggggtggggtggggtgtagatgttagaagatgggctggcaaaatgcctcatttgctgcccttggcagaggacccaggttcagttcccagcacacacataggggttcacaactatttgtaactccggttcaaaaggatctaataccttcttctggcccccttgggcaccagatgtgcacacagcgcacaaaatacttccaggcaaataagtgtgtacacataaaataaaaagaaataaatctttaaaagaatattagaatgccaggcagatagctgcccactagtaaacccaagtaggagacagaggcaaaggggttgctcgtgagttcaagaccaactggtctacatagtgagttccaagccaaatagggatacaaaataagaccctatcttaaaccatcagcaacaaattacgggaaatgccaaattccctaatggatactcataggtttttacctggtcatgtggacatagaacaataagagaaatttcctaagatgcctttgtccgttctcatcttaagatgaggtaaacgtatccctgctgccagtggccagtgcagcaggaaaggcatgtcccctacccccttgccatccctttatccaatcatttgttcaagaccttttcttgctttgttcctgatgtatcttgtgtcaaacaaactggattgaatttctcaatgggattctgctcccacaatcatgagctacagtaatctatcaaacatccctggagtcccgagtctatggttctgcccagtccgagggacttgggcaactgttcaatcccatctgtcccaggccctgtgatgcttaattaataagaggagtcctctaagaagagaccttcaaatacatgaattagaaaaatattttaatataaactaaaagacttgggcaggaacattaatgctatccccccgccatcaaaatataaaaaaattatcctcgatgtataattccagctttttctttccaggcaaaatttcttttgcccaaacagtgagaggtaaaggtatgaggcctacttggagacccttagctcgtttttgtactctgtgtagattttcagtcactgtaggtctttgtacaatcctcatctcgctggtaaatgacagggacgaaccccagttaagtctctgcctggattccatggtgcataattctctagctttgtggtcaacatctgtctaaacagattcggtcttgtcgctggccttgatattcctggcttccatatccccaccccgaagaatgagcattgtcccttgtgtgggaggatctgttactggccagtttgatggcctcttagatcgctgtttgtcccttcacctcaggagtggactgaataaataacaagttaatttttttttttcaaaaaatgcttctagccctgaaagttcaccttccagggttgtccaggactaagtgtccgctgagctgggggctggctgggaaaagagtcaagaggctgagggtggggcgtgctgctcactggaagcaggcatctgaaggagtgagttgagaataagaataaggtttgtaaaagtctcagcttaacagattctcaggaagcacagagctaaaggccacagtcagaaagagtggtgtcatggtccactcacttaggagaatggctgtgctgtgagaagccacctggcacagtaaccagaggaggatacattgattttggctcacggttccggcggattcacttcatggttattgtgctctgtgctcctgaacagaacatcacatcctggcaagagcaatgtgtggtggtggaggagattctcatcatagatgcaaaacaaaaaggcatctatgaaagagatctaggaagggaccagggtcaaatagagctgtgacaatatggcatcgctgacctgcatctttccagctagattccatctgccaaagtttccagaacctcccagggttatcaccagctgagatccatgtgtacaatcgaggaacccatgggggatcatgtcctattccaaccataatactgactaaccatggcttgttaatttcagctgccttctgataggattcactccatgcacccagcattccagattacacaggagtgatttctgacgtccctagctacattatgtgacaaggagaggtgtgtgaccggcaaaaggagtcatcaggacttcactacagtaagcatgaagtgtctgaaagaaagccacagatcctcatggccattggcattgtcaggatggcaggcgtggtgaccccagagatgtcaccaaccaggcagggctgtgtgcaagcatacatttcatatttttagtatttgacatttttttaaaatggcatcaaaatagatctcagtgggaaagggggctttcgtaagttggtttcactttgatctcatagtttattatttttccactttagttatatgtgagttgtgtgatcctcattggatacaccacagtctgtgcagagttaggtcacctgaagatgtttgtctgaccttgtttgtccgtgaggaaaactggcaagttgaacacagcagtcccacacgggcaacaagctggcccagttggttattttgacctcagggccttcgtagttcgcaaagcacggaagcgttagctcccttcttcctgaatccgagttatgagtgccctgttaccccttttattagaggattttgcaacaagctcacgtcatatttacgaaagctaagcattcatagtaattgggctttgtcatttctcacactgaaatcccctagttctcgccaaaaaccagtttggaaaacaccacacaaaagagtttggggttttgtttttaactcaagaagcctctggcttttaccagaatcttaaagttctttccctcctccaaaatagtgggtgttttgttttgttttgttttgtttaaaaaactgcaatggtaagacagagtgagcgaggttctacctgcagaatggtttgggcaacacgggaacgtgaaggctaagtcaagaacacgctgtgagaacagttgtctccctcctggttagtgttggtgtctctgctttggagactgctgggaagtagcactgttttgaaaaacagaaaaaaaattgtctctgaatcatctttcctctgtgatctttagcaacatgcctaaccgatgaggtacgactacttccaagccccttgataaggtctgactggaccagaggcccaaaaggcttcagtaacatctttgaaagaaactggttgagttctctctgtgccaaaagccgattcctgggattctactgaggatcctagcacacgggaacgaagaggcttgatctctaccccgtggacgatatcttacttacttcttttgtttctatgataaaataatctggcaaatacaactttgggaagaaggggtttattttggctaggagggtccaatatggtaggaaagtcaccgcaacaagagcttgaagcagccatacagggcacatccacaagcaggaagcagagagcaatgaatgttaacactcggctgttcttctccagctcatacagtataggatccgcacttggggaatggtcctgcccgccatcaagatgggcttccccacaaaagtgagcccaatcgagacacattgcatcacagacattctcagaggctgacttttaaatgaccgtttctcacacgtatacttggaggcctgagtgctaagtgacggttgagcctgtcaggttgacactgaacactgcccatcctagaggccttgaccctgagctgtgcttcccaagcatgcagcaatgtcgtcagtcgggctgatgtaactgggtcacgcttctatccagaatctcaccgcaggctatcatcccgaatcacggaaggaaagaaatagccagtgagaaggcctttctcattgacttaagttccttggcatctgctatcccaaggttgccttgcaaaagaagtagcttaggatcgccccagggatagatcacatcctacatttgcagctagaccgtgcttggctagactttcgactttattacaacacttctctcccttttttccattctatataagacaaatccctttgtagtttgttttaatcttggctgttgttgtttgttgggtttctgttggttttgttggctttgtcccctcttacctaacggttgttaggtttttattgtaaacatctttgcagatcaacaagtactctttgaaaacatggtctttaatgactattatctttgcacaggcatattttcatttagcccctttttaaaaaatggccattttgattgcctctggtgctccactgttataaatatgtaaacactcttgtgggtgttgatgggcaccttgtgaataatttaagaaaaattcccacaagttggacaatctatttttttaaacttaccaattagtaaattctgatccagaagggcatcagtgtctatggcagaacttgatcccctttggtttcttagacaaaaatgcacattcatgggtcccagggatatcagaagttctgatcacaatttcaggcattttagatttatccatatcacttcatgggttggccaaccatgtctagatttcacctgctatctttcagacattataaatatacattttaatgagcccttgatattcatatacatgtcagagcctgagacctgcttatatgttacacatgcaaatatgtctagtttgatacatattcattccattggtatttattacacagaaaaaaattaggaaacccttggctagtatattgtcatattctgtattgctataacaaaacacccgatagataaaaatatcattaaaaaggacatttatttagcatatagttctggaggttcaagaacatggtgcaaacatctgctctgctccaatgagaacctctgggcaaatgacatcacagcagcggaaacacnnnnnnnnnnnnnnnnnnnnctgtattgctataacaaaacacccgatagataaaaatatcattaaaaaggacatttatttagcatatagttctggaggttcaagaacatggtgcaaacatctgctctgctccaatgagaacctctgggcaaatgacatcacagcagcggaaacacctgttacacagagaagagggatccaggagaggtgccaggtttatttacagcaaacattctcatggaaactaatcccactgcacaagacctatgataatccctcctgtggacaatgcccccatgacctaatgaccttccaggagcctcacttcctaaagatctcacagcctcaatactgccaagcctcagcacatagactctggaggaaaaactaccaagtccatagcacacatccaaatgagaaattatcttgattctttttggcttctgagtttttgctttagctggtatgttacagcacaaaggtaaccaggaaaccaggttagacagggaaccaggaaactattataaacatgagagcaatgcagtaaacataggtcatttacttcctatgatcatccacagattaaggagcagagactgaactaaacataggacccaaagatacctaaccttttagtagctaacagaaggaaccaacaagactgacccctgaagcagccccttgcctcagccagggaaactgtatcatttcagagaacagataatggtcccttgcatcagtacaacactgcaaaaaccatcaacccatatgtcatgtgataatctgacagcccccacttcctctcattctctaactcagctgtcaagggggtacatcctgacttatgcgtctctcttctctctctctctgtgtgtgtgtgtgtttcaagaccaagtttatcagtgtagccctggctttcctggaacttgctctgtagaccaggctggccttgacctcagagagctcaggtagaacatgcctctgcctccggagggctgggattaaaagcatgcaccactgtcctttgcctttcaaattctgcctctacagactgttccactgtccacagtccccctgttcacattcaaataccataaccctccatgtagttctgtgcctacccatagtcatactgtcagctggcgaggggtgaaacccagtgatagcacgtctccatgctgagacaccagagaagctgctgtcatgaccaatcctaccatttcatggctggcctcagtcccataggtaactctcttgattcttggctttctagtccaaagttatggatacaagctcagatcagcccggattctaatggtgtttacaatctccctcgagtctggggttcaactgatggaggctgatatttcaggaatggctggggcaatcatgtccttgctgtgtttgctccatatgaggttcacgttcctgatgtcctgcaaatttttcttcaaaacaattttttttttagccctgggagttagtggtgcacacttttaatcccagccagaggcagaggcaggtgtatctctctgagtttaaggccagcctggtctttatactgagttctaggacaaccaaagctatatagtgagaccttgtcccaaaacaaacaaacnnnnnnnnnnnnnnnnnnnntgggttggccaaccatgtctagatttcacctgctatctttcagacattataaatatacattttaatgagcccttgatattcatatacatgtcagagcctgagacctgcttatatgttacacatgcaaatatgtctagtttgatacatattcattccattggtatttattacacagaaaaaaattaggaaacccttggctagtatattgtcatattctgtattgctataacaaaacacccgatagataaaaatatcattaaaaaggacatttatttagcatatagttctggaggttcaagaacatggtgcaaacatctgctctgctccaatgagaacctctgggcaaatgacatcacagcagcggaaacacctgttatacagagaagagggattcaggagaggtgccaggtttatttacagcaaacattctcatggaaactaatcccactgcacaagacctatggtaatccctcctgtggacaatgcccccatgacctaatgaccttccaggagcctcacttcctaaagatctcacaacctcaatactgccaagcctcagcacatagactctggaggaaaaactaccaagtccatagcacacatccaaatgagaaattatcttgattctttttggcttctgagtttttgctttagctggtatgttacagcacaaaggtgattattagacggggaaccaggaaactattataaacatgagagcaatgcagtaaacatagatcatttacttcctatgatcatccacagattaaggagcagagactgaactaaacataggacccaaagatacctaaccttttggtagctaacagaaggaaccaataacaagactgacccctgaagcagccccttgcctcagccagggaaactgtatcatttcagagaacacataatggtcccttgcatcagtacagcactacaaaaaccatcaacccatactcacctgtcatgtgataatctgacagcccccacttcctctcattctctaagtcagctgtcaagggggcacatcctgacatatgcctctcctctctctctctctctctctctctctctctctctctctctctctctctctctgtgtgtgtgtgtgtgtgtgtgtgtgtgtgtgtgtgtgtgtgtgtgtgtgtttcaagaccaagtttctcagtgtagccctggctttcctggaacttgctctgtagaccaggnnnnnnnnnnnnnnnnnnnntttgcacataacacctaaaatctaaaagccagataacttcaacaggggaacagagagccaactgtagggtgtgtaacactgtctgaggaaaggacacctttttttgctgacaagttgaaaggatcagaaggttttttatacagggtaaaagaagacctatttagagggttatacattaattggaactaaatggcagtgaggaaggtgagcgccaaggctgccaggctccagcactcgggtgatgtgactctaaaggagaccatgggagtggtgccgatggacaaatctgtgtccaggttgatgctctctgtgaaaacatgttacagagctattgaaacacactaagttcatgtaaaagccagagaactcggatagactccatccctggactcagagtcagtgtcctaatttttccattttatcgtaggtgagcaaaaggggccgatacatatatctacaggaattactcaaatagaaaatactactgtcagcaagtggagaccagggtgtgggaaaactgtgtacctcataagatcctgctagagtactacacttcctacccacttccttacttgcaacagggtctcaccctgagcccaggctagacttcagttccccactctcccacctctgctgggatcacaggtgtgtgtcagcttcctatactcttcttgtaacttcttgtcacacacacacacacacacacacacacacacacacattgccccaaaaaagaaagaaaatgttatttttttaatttcttaatttttgttttcaaaacagggggctggggagatgtcttagcaggtacgagcatcttttcttccagagagctaaagtctgcctcccaggacccgtatcaagctgctttcaaacacaaataactacagctccaggagatccagtgcccctgccctccacatacacatatcagacgcagacacacatgcataatttaaaataaaacagggtctggagagatagctcggtgcttaggggcatgcattgttcttgcagaggactcgagctgagtcccagcacctgtatcagacagcttacaactgtaagttcagcttcaagggattcaccatgcttctgagctcttgggtcatgtgtgtgcatatatgtgtctgtgtctgtggggggtggggcgcacgcgcgcgcacatacacacacatatgtgtacgctcatgcacgcacatacacacaaataataataaaaaatttgaataataaacatttttaaaaggttttacaaaatgaaaaaaagaagcaggggacattccccatccnnnnnnnnnnnnnnnnnnnnggctttctagtccaaagttatggatacaagctcagatcagcccggattctaatggtgtttacaatctccctcgagtctggggttcaactgatggaggctgatatttcaggaatggctggggcaatcatgtccttgctgtgtttgctccatatgaggttcacgttcctgatgtcctgcaaatttttcttcaaaacaattttttttttagccctgggagtagtggtgcacacttttaatcccagccagaggcagaggcaggtgtatctctctgagtttaaggccagcctggtctttatactgagttctaggacaaccaaagctatatagtgagaccttgtcccaaaacaaacaaacaaacaaacaaagaattttcagattcatattttatgtgtatgtgtgtctgctggcatgtatgtatgtgcaccatgcacctgctgccctcagaagccagaagagcaggtcagatcctctggaaactagagttagcaatggttgtgagctaccatgtgggtgctgggaaccaaacccaggtcccctgcaagagcagtgctcttaaccactaagccatgtctcctgctccttcaaagcctattcaactgatgcatcttctgatacatgaccttttggtcactcaaaggactgggtccgtaggctagggaattgatgagactgatacttcagcacctaatcagtgggagagggaaatcagggttctgtgacatctagatggggtttctgcatcccactgcgggatttccaatttcacataagcaaaaagcaaaaggtactcagtaggtcttctaatggccaggtactgctggtgtcctgactctacctgtctgtgttgactccatgcctcatctccactatgagagtggcatctacccagtctacagccatagctgcaggaaaggtctagcccaagaaaactctgtcccttccccataaatttgtatcaccttccttgccctgtagaagtgggtgccacttgtccaagagggccttggctcaaagaggttcagcagtccctaatgggacatcccattgctgttgccaggagctacttagcaaaccagaggaggccagtcatttctcaccacctaaatgtcgggcagcataaatggccatgtagacagttaccaggaaagctggaacagggaatgtttttgtttttggggaccatcctacccaggatcaggagccccaactttatttccattttattgtaggtgagcaaaatgacctgctagatacctacaggaattactcaaatactaaatactactgtcagtgagtacaggccagcgtgatggaaaactggaggccttgtaccttgctggtgggaatctaagatggtgcggccatcctttgaaacagttgatagtgttctttttgttgttttgttttgttttgttttgtttttggagacagggtttctctgtatagccctagctgtcctggaactcactttttagaccagactggtcttgaactcagaaatctgcctgcctctgcctccagagtgctgggattaaaggcgtgcgccaccacgcccggctagttgatagtatttttacaatgtaaaactttctttctatacctcccagcaaatcctctcctggatacttacacaagaaagatgaaagtgtacattcacataatggtctgcatgtaaatatccatggctttgcacataacacctaaaatctaaaagccagataacttcaacaggggaacagagagccaactgtagggtgtgtaacactgtctgaggaaaggacaccttttttgctgacaagttgaaaggatcnnnnnnnnnnnnnnnnnnnnnnnnnnnnnnnnnnnnnnnnnnnnnnnnnnnnnnnnnnnnnnnnnnnnnnnnnnnnnnnnnnnnnnnnnnnnnnnnnnnnnnnnnnnnnnnnnnnnnnnnnnnnnnnnnnnnnnnnnnnnnnnnnnnnnnnnnnnnnnnnnnnnnnnnnnnnnnnnnnnnnnnnnnnnnnnnnnnnnnnnnnnnnnnnnnnnnnnnnnnnnnnnnnnnnnnnnattgaaacacactaagttcatgtaaaagccagagaactcagatagactccatccctggactcagagtcagtgccctaatttttccattttatcgtaggtgagcaaaaggggccgatatatatatctacaggaattactcaaatagaaaatactactgtcagcaagtggagaccagggtgtgggaaaactgtgtacctcataagatcccgctagagtactacacttcctacccacttccttacttgcaacagggtctcaccctgagcccaggctagacttcagttcctcactctcccacctctcctgggatcacaggtgtgtgtcagcttcctatactcttcttgtaacttcttgtcacacacacacacacacacacacacacacacacacacacacacacattgcccccaaaaagaaagaaaatgttatttttaaaatttcttaatttttgttttcaaaacagggggctggggagatgtcttagcaggtatgagcatcttttcttccagagagctaaagtctgcctcccaggacccgtatcaagctgctctcaaacacaaataactacagctccaggagatccagtgcccctgccctccacatacacatatcacatgcagacacacatgcataatttaaaataaaacagggtctggaagatagctctgtgcttaggggcatgcattgttcttgcagaggactcgagctgagtcccagcacctgtatcagacagcttacaactgtaagttcagctccaagggattcaccatgcttctgagctcttgggtcatgtgtgtgtgtgtgtgggtctgtgtctgtggggggtggggcgcacgcgcgcacacatacacacacatatgtgtacgctcatgcacgcacatacacacaaataatactaaaaaatttgaataataaacatttttaaaaaggttttacaaaatgaaaaaaagaagcaggggacattccccatcccagagaagcaactctcctattgctaacttggccagtcggtgtctaatgtggggttggtctgttccatgtccaggcagctgtggccacaccctctgctcccagacatcccagctctatgggatgacagctcagatattcttacagtcaatgtgaacataccctcttcctcctccctgaggctgtaacgtcaaagctaggtaaagaccccgagagctaggaaatagtcacccagtgaaaatcgggccaaccatccttctcggcttgctctgtgattccgtttccagtgctctgtctggtctgcacttcatgcagatcattctcttcacctctagcaaggggcccctccctatggagggagattaacccttcttcgctccctttcaatctcatttagctgagagcgtgcttctcacagcgctgctggctgggcaaagagcagggcggaatgctccacagcgagatggctgccttccctttgaagcacaggaactgcggtaaacaccttcttgcccgacttggccctgaaaagatggttttgaaactgaacttgctgtgagttgcctgggtctgcagtatggaattgcataagaatgtgggcatttaggtcaaaggggactctgaactcaacacctcagaacctgtcatcatggaactcacggcttatttattccctggtcctgcagaagggtctctggcatcccttaagattcaggccaagctgggctgaagtgtatgtgacatcctgtgcggaagtgatacatccacatacaagccactgtccccatcccatttctagcctcagtaactagtttcttgccatgtctttgtgcgcgcgcacgcgtgtgtgtgcatgtgtgtgcgtgtgtgtgtgtgtgtgtgtgtgtgtgtgtttcatttcaaggccatgagaagaacaaaagtgtgagctttttcaggcctggtggtgagttggtcatcagggcagggacagaggcagtttgggttgctgataactttttgtcaggtttgtaccgcgattggtttcgaagccatggtgaacaacagaaaatgaaactcgcagcttatttttagcggttcatgctaactcatgagatgtttttctttgcaaaccaaatagcagaaaggtgacttcagcgaactaaatttagactgcttgacttacagcagttaagcccggtcgtctgctactacccacgtatnnnnnnnnnnnnnnnnnnnnctggtggtgagttggtcatcagggcagggacagaggcagtttgggttgctgataactttttgtcaggtttgtaccgcgattggtttcgaagccatggtgaacaacagaaaatgaaactcgcagcttatttttagcggttcatgctaactcatgagacgtttttctttgcaaaccaaatagcagaaaggtgacttcagcgaactaaatttagaatgcttgacttacggcagttaagcccggtcgtctgctactacccacgtatcagaggcacttggacatagggacttttgaagctatacttacgattttgtttaaaattatttttagttgcgccttttaaagatgtaagcgtacttgctttggggaggaaccgagaaacacattacaagcgctcatcgtctggcatctgaccatttttgtgtaatctgcagcagcttcataagcaagcgacagtctggaatttggtctaaaaggagtcagtctatgaaatcactgagagcagagctttgcagtgtaaggagtgtgtttctctcccgctgccagggttgctaggcgtgcggtacttactatctttgaacttgagacagtgcagatggtattttctaaaccatcttcctgccttacaattctctgaagcacactccggccccaagggtctgtggagatgacgaggtcctctctggaggcagaggtggtctgtcagtccaccatcatttgcattttccatttcctcccccagaaagggtaggtttccctgcttctcagtcaacacgggtttttctttgaggagtgagtgatggaacttttaaaaggtctttgaagggacccccagggccattccttcacacatgggccaaagctctccagttctagacagtatcactacctaaaatggaagatgcccctagtagtaagggaactagtgaacgagttccatccttgagttaggagtcaatagcaatgtcattgactctactgagccattccactgcatgaggcaaagccccaggagcctggggagacacaaagaccccacaggagacaagcccagagacccaggtaaagacagctacttggctacttcgatataccaaatgcctaccgtgcttctgctctgtccaaggaaaatggggtcactgggggtatgttggttgagctgccttggctgaagtgaggtacacagttgagattctgaggtacagactcatttatctgacaaaagaaaagaccaggcactcctaggttaagcctgggaacatctgttgtcgaggggaggtacatataggaagggaggctcctcttacatgaggtacatggtatagttccataggagccgagggaggcatcgttctctcacaggaggtacatgctattcactcacaggaaatcttgtttatagtccaacctttctttttctacctgatttccattctctctagaagaaacttagctagactagcctatcgtcttgtctgtctgtatgtgtggtcaggggcagatgatcatagtgtcaaatgggcctggtatgggaatgccagtgacccacatggactcaaggtcatctaaatattgttcttcacataccacccttcaaatgcactgggaaacaagagcaaagatcatgtagttgctaaggctgacatagcaatgaccattgaaaggtggcacgagttgagggtgttccatctgaggatgtctggttgggttgaggtgcaccgtctccttcccatctcaccagggtgtggtccccgaggctgtctgtctgattcttaccatcagtctttcccactcgctaatggctggaagtagaaagccattgtttaagacctgaaggcttcttagtactccaactacgcaggcgccccttccattcaccacctcactacacagaatgaggtcatcgtttcccatccccaggcagggtggcgagggttgctaagaaagccccttggagagccatctcactggcttacaaaactgctaacgacgaatcagaataatctgtcacagatacaggaggcaggggcttggaatctagctcttagtctacccaactgcgaaagcaagctggggtgggttcttttagggtcacatacaaaatggattttagctaggagtaaataaatggacagttgaatcctagcacccaggaggcaaaagcaagcaggtctctgagtttgagggcactctggcctaaatagcaatctctaggacatccagagctacatagaagatgagagagggagagagagagagagagagagagagagagagagagagagagagaggaagaagaagaagaaggaggaggaggaggaatgaacaactattgaacatcactcattaaaatgatacatttaaacacttagttgagaaaaatgtcttaaggtcttacacaaaaattaggttcatgacctaagtcatgaaagagaacttaaataccttaaatgttttcctacattcaactccattatagttcttttttttttttttttttttaatgctggaaaagtgcattaaaatgtagttgtgagagaaagtgtaaatcccaagtggaactccttggcttcagaatggccattgtagctatgtgaaagttttccttgaggcgtataacatttgggactgcaaaagtgtttgagtggctgcctgaatctagctatgtggtgtttttatttgtgagttcattacaataaagtagaaaaaaaaaagtctgctaaaagccatgcaggatttggaaagggctggggagatagccccaggtctcagggaaaaacaaaataaaaatggaacaacaacaagaaaatggtggacatccatcctgagaaacagctaccacccagactgaattctgctctccactggcatgtgtacacatgggtctatatacacccccacacacacatatacctacacacacacacaataaaaataaggtaaaggaaaactgcgtgttgggggaaaggccttataatatgtactcggttttctgttcaagataacaatactgtttggagttgaaactaagacaacctgatgggtgcgttgacttttttttttttttttttttttttttgtaactggaattaaagtctagctagcccatatagaagacacacaatccaggtattttattcacaagccttaagcctcgattgggcaggtttggagctattctaactcatttcccaaccatgatgtcccttgttgtttgctgtttctcctggccatgggctcatagtccatctcctctcatggtagtctcctccgctctctgagtcctttcttcttcatcttctctctctacctgcaacccccagtcaggtaacagaatacccgcctacctcaatctattgcccaatcacaggctttagcctgttattaaccaattaacttggggagcaaggtgacatagcatcatttattaatataacacagttaaagtaagtatgatttttcagctttgatcagtatacagaagtttctgaccagatctctgagcaagatatagccattggaactgtgttggactttctcaaaaatgtcagctaaaatattatcccccccttttttttagattttttaaaaaaaatgtgtatgagagttttgtctacatatacgtctgggtatcacaagtatacctggtgttcacagagttcagaagagggtattggatcccctggaactggagttacagatggttgtgagccaccaagtgggtgctgggaatcaaacctagataccctgaaagaaatgccagttgttcttaactgctgagccacgtctccagctccccaaaattattttaagtgataatcattttattgacggtgaggcggcacatacctttaatcccagcattcaggaggtagaggcagatgggtatctgtgagtttgatgctagactcacttacatagtgagttcctgaccagccatagatactaattaatgcttaaagaaggaaagaaagaaagaaagaaagaaagaaagaaagaaagaaagaaagaaagggagggagggagggaggnnnnnnnnnnnnnnnnnnnncacacacacagatacatagagagagagggagggagagagagagagagagagagagagagagagagaaagaaagaaagaaagaaagaaagaaagaaagaaaacgcccatattgtttccaggcctgaatttcatcaaccttataaaaatatttctgccttttgtttaaattttcaaaatttaaacaaaaaatattaagcatggtgaacatttatttttaaaatccagttgactagctaacctgaccatgagctcacctgcttgtatttgattaggtataaaatgaagccagctgcaatgtttaaagcgtgaatggcatcaagaaacatagaatccaattcaaatgtttataaatggaggattcctctgggacttagtgccctgacttgatgttttttttttttttttttaaatgagaagagtcgagctctgttcagacttgaattatgtactttgcataagccaggcaatttaactttaacccacaggcctggaaataaaattagctccgcctgcagagcacagaggccatgggcaagcaagagcgtaagtcagagaaagactccttgcagccttgctctggcctccagtttgtccttgctgaattattttgggaaccatgtgtttgacttgccaaagcctacagtttttactgtggaaagggattcctgtttaagctaatgtctgtgcatattccctggggatgaggcgcatgcgattttttaaaaccccaatcgaatgcatatctttgccacttgtaatcatgataaagcttaaataattcagacatgagcaaggcttttttttttcccctccagtacaaaacaagatttattaggtgacagcatctacccagactcgttccttagaatatttacagctagaattcatgtttgtttaaaccatgcaggtttggtaaatatatcatgtttgctcactgtttagggaacatcacaaaataacatccaatatctgtctttttgtttattttgacaaagagtgaacaagggtgctcgacagagagatgtagaaaccctagacctgacaccttgttataagaagtacaagtctagggcccaacctcagcctccagccttccctataaagcagtggttctcaacctgtgggtcatgacctctttgggggtcaaaggaccctttgcatatcaaatatttacattatgattcataacactaagaaaaaaattacagttgtgaagtagcaacaaaactaattttatggttgggggtcaccacaacaggaggggttgtattaaagggtcacacgtggcatttaggaaggttgagaactgctgctgctctaaaggaatggacagtgctcattcactggtctccaaggaacctgggatggatcatcaccgctgtcactgtcatttattatcccagaccgaggaggcactcacatggctcaatgtagtcaccactgattctgtaccttaataatatattgtgagtgtgtaatgtgaatgtccagccttcagatgtcattcacgggactatctcaactggcagtgtgtgtcgaatgccaacgtgtctccttcaactttctactcatcttgaaggaacccggtaatgatatttttgagaattcttgaattttggtttctttaaaaacacacacagagagagagagagagagagagagagacagacagacagagagattaggatgtggggctgcttcagactgtccgaagcagctgacttaggtttgcctcgtgctctagcagttgcatgattttgccagctgtagatagtttctgcaattgtgtgacgtttggaattctgggaacttttcagagggtgctggggcccccaagaggcatagtgggtggttgttattagtttagggaggttgttttcaatttgttactagactagtcaaagacgaaacaaaaggaaagaaattagataaaaggatctctttcccctctagcctttttttctctcctatctagtgttaggggtgaaacagggggaggggtggggataaaggctgggaataatgacccacaaagtagcaaggaccagctatatataggatcctgctttataggtgaccgtgtggtagctaacttggtgcctgtaactctacataactgtttatttctagaccccctcaggaaagaaggaattagccaaggacactccatgctaatattctgtcactgtcaatgtcgatgtgactcagggagcagtgaagtgggggtcaggaaggcagctccaccattggtgttagaccaggagctactgtttcccttaaagccacaggcatttctggagtactcctgagagagaggtgagcttcaacaagcagagggcttgctgtggatcaggagggacccaccttccccacagcctaccccaccgacagaatatagcctacgggctagagcggggcagggatgctttccacccagctagaaaccacttctgctctgaggaagaagatagaatcaaactggaaacaatccagttgtggagcccagtacccaggctgagagttttccaatgtattttctcctttaagcaatttttaggacacatgaatgctttgctaacctcattatattcccaggctgtcctcactggagacagcgtcgctgaaaaactgacaaacccagaagatagtaatttatggttgcattgttaaaattaattaacattattagcatgtttgatgacgcaataggcaattaaagtctgttggagagatgagatgaaaaatgtaaagatactacgtatttaaaatcaggctccgaacgtttcataggctggctggcttgtagtgatggctctgggggtgggtatggtctctttgtaggaaagaatcactttggttttcttaaaagtctacttgttatacagcattttttttttctttttttaatctgctggtgggatctttttaaaaaaaatctaccaagctactattatttcactttgattttatagcaaaatagtatttgcttatgaggtgtttcttttaaatcctgaataagctgctattaaacagtttttgttccacatattaaacattttgttgaaatgtgagctgtgtgtgtgtgtgtgtgtgtgtgtgtgtgtttgcgcgtgcgtgcatgtgcacacgcacacatgtgcacacatgcatatgtatatgtccgagggaggaaaggtctgtacctaagaaatcttgaaggcttttttgaaaaaaataattcctcgtaattatgaattggagtctatcgaaagcggcctccgtttattacgtacagccacactagatcccatcaatcctgagcagtgggggagtggcatgaagaagacatgaaatttggtgtctgagtagacgagatttaattttcaggaaacatttcactcatgaaatggatagcaaccctgtatcagccctgacctcctaatgtcaatgctatggtgcaagtgtgaagctaaaataagcctctaagtcagacaaagggacatcgcctctccgcactcgtctcttctcaccagtatataccgtcgccagccttttgctattcctataacgggcttgttcgctttggagggggagggggaagacaaatcactcctatgtttggaacatggatggtgggctgctgtaaatcttactattatttaggttaatattctaaagatagctcttaattctttatgaaggccagctgtacatctgaaggaacctgacagcagttcctttttctatactgattttatttggtttcactggcatcttcatacaatcctgtctgctgcggtatctgccgctctgtactgcagatacatttagctggatacatttacaccgcctgtggttaaaggttatagaacggatacagacaactgatcatgcattcttctacaagcctgccggcaccttagggttttgaaaagaaaaatctacaaatgctattttctttatcagaatccgtcttcacttggcagtagcttaataggtttgttgggttttttaaaattattattattatcttttttacgtttcttgctgctgctagcaattctgtgaaattaacagtctataaaatgcatccccgagcagatacctactgtattgcaagctttctccaagaagaggatatgacagtattcattccagctgatttccttccttagcacaaggactgtttgatttgcagaagcagacgattcattcactgtgcagccgcgctgctgcttaagtgcatggaatgccttcgactgcctggttgcagaatttggagtttgctaagcagtggttagtgattgggctcatcttgcatcaccacttgatggcatttttctttgttccctcctcctacccagttgaaccaagactctgaggctgaaatgcaatgtcacttacaacattaatcagatcccgcatttaaggtgagctatcccttgccgccgcctccttccctcacgcttgtgtgctgcatgcagtttgcgtcttgcttgtgtgagcctaagatggcaggcaggattagccgtgctgtgccgtgtgtgcatgctgtgtgtagaattcattacacgttgcctagtgtttcagatgtgagtatgtaaatgctctttatgccacatcatctggtagggaagacttgttttgcctcattacaaccttcgttattgcgacacgatctttctttcaggattcatttgcttctgggggtttgctttgcatcccattcaaaataagattatgccctttttttttaaacaaagccaaataaatcccacaaaaccctaaaacccaaacgagagcaacagaaccctgttaccagatggtgtctccccgtccttcttgcatttgctgtcttttaaataatgtatgttgtattgttaattaatgtgaatatcaaattaaacacccgaaacttacatgtttattacgcaggtaggaggaaaggtggactatttttaactcccagccattgcatccggtgcaagcaactccggctctcacgtttgtgtttgcagagcccgtgtcagtggtttgattttcagcaaatgtgacagtggcctttgcagtggtcagctctgagctttgaactctcagaggagcaaaggagaaaaaaaaattcaacacagcacctccttggttgcagcctcagagaatccttggataagaaacttctttttttcagtcctgttttgctgttgataaattcagtcctcgtgatcacggggctctcaagctgctcggcgtatgatttttggtgtgtgtgacaatcgcatctaaaacttgtgagcaagaagacggagaaatcagttggtctccatcgccttacataaaaatggccgagcgtcttgttatgctaacactgccctgagtgatacgcacaggtacgttggaatttgcatgctttagagactttttttttcttgagccatgcaggaaaaaacatcagatgcattaaaatgtgacttttaaaattaaaaactaagatccctgtaatatttggggatgacattaaactgtatttgatggcctctcccatcaaatactgcatagatataagcataaacttatgaagtgattctgctgttaaagtggggtgatttctttttttaaaaaaaaaattcaaatgtgggataggtgtggcgccattagacaaaagaaaaattggaaaagtctggtggtttggctcaattctagtttgaaactaaaaatcaaataggtttttggagacaatttcaaagagcgtaaataggctcaaaaggaactatcaaaaatgttaatctctaaggcgcggacattaactgtattttatatgaaagatgaaaattaaatctttcaaaatcatattttgtcaaatacaatgataaatccaccatttgtttgtgcatggagcagggggacggggagttatcgtttttaaagggaaaaaggctaagtgtccatggccctcctagctgaaattgagctccactaaatgaagctgaacccctagaacggctcactgcagaaatacagttgtggctctccaagtgcccaatcctggcatctttcaaaaccatctcatgtgccctttcctttcagcctaacccctcaaaaatattttagtttcaaattaacactgggccagaacctgtttccttggcaactgactcacattttaaaatgcagtaatagatatgcacaaagctgtcttagaaaaggagacacatgccaagtgagaaccctatagttgtgtgtcctctcctacagaattcgaactggctttagactttttttttttacatgtggtcttcaagccttcacatcagctccatctgcaattgtacggaggcttgcttgggagagcccttctcttccctttgtgctcagttcgttctaaattaaggtttccctaccattcactctagaatgcaggtcaaggactgtggagagaggtggactctcactctcaggcgctcacctgtgcctctgaaacaaaagctgcttcagaaatcctcctgcttctaacttcctcagccctccatggtaacctcccagctcagggtagatagagctggacccaaacccaggccttccttccccgtgacaagtgcaccctgagccctcatgggagcgtctctgtagctgttgccacatctgaaacctctgggagctgctcccaagtgaagaaatttgagcctcagagctggatatgtaaatgtttgtttccagcaagtctcttccactccctatagcaggagctgcatggtcaaatctctcatgggttaaagagtgcttgctgtttattgttattgtgttttgaggtcaactaaatgattgtctttggaatcgttctgtggctcagttatatcagaacatgattcatctagcgattctgttccctgggcttgccggagaagagctttctttctgcaacaccttccccccaacccccaccccgaaaggctgcttgggagccattttgcttcttgccctggtcttaaaatgactaagtgccttttgaatatagtatttatcagactgcagaccacagggaaatgtcagaaacctgatttagtgtggacatttattttaagaccagcgtcattaacaattgcagaaggatgggaccgattgtcacttgctgctggacaaagagtgaactcggcatttgtagttaaaacacttgctgtgcagaaaggctctaacagaatgtcctccatcttgataggccagcacaaatgaaccattttaaatgaatctgaatcttagctgcaagattcggtggatgacctgcaggtgacgttctagcgtgaatggatgcctgatagagcccacactctatgctctctagccttttgttcaacttaagcatggtttcgtcatcttgtagattttcatagctaatgatttttcttttaaatgacattatccatttgtgttgcttgtagtcacgcctaacagaatttcagatataattcactgagccagaaaaaccaaacacaactgttgggaaacacactgcaacattatcaccccaataaacagacgagtaaatggaagaattatttattgcgttgttgtgtgtcgcttagtgcgatgtttgccagggcataaagcttttctaaacttacccatttacagttattattggatttcctagattagctgcaatgagcggagatggtactgactcctccccgtttaactgactaggtaagcttagctcatttacacattttggctgcagtgcttgcgctgggcaggccagagcaggcgtgagaggaaaaatgtgcaaacgactgctttgttctgacaacaaacggaatgggcaaacgtgtggctcctctgcctgaatgatttatagtataaaattgtcaacttttgtttttctttgggaatagaaaaatgttttcccaagctttagttcagtaagaacacaaggctattacaccaatgggaatctaactcggccttttctgagagtcccctgtagctaatctagtggccaggccacagcttagacttacagcctttttatatgtgaggaggaggggaaaaaatctaaaaattaacctagcacctttctctttattactaaatcatgctgagtaagcccttgagtttctggttccacgtgacttgttctaacagctaacttccccaggttaaataaacacttggtgcatttactgagtacctgccgtctacagggcttcgggcttattccacaataaccaagacagagcagagcttgcttctcatgttcccgtctttactatggcagggtaggcagtaggggaggggcaaaaccaaacatgtaagcaactaactaacaaacacatgaacaagaaggaagagtagctgggtgcactggtacatgcccttcagttccagcactggggacagattgtgagttcgaggctagcctggtcaagtgacgctgtctcaaaaacacgggaagaagagaaactaacagttaaaaaagcaagggcaatgtgctgtagggagtgccccctttgaaatggttgttttgggagagccttcctgggactggtgccttggtgccaagacgggcagggtaaagaaagatcaagccaggcaaggatctggtgaggcgatactgggcagcagcgagtgtgtaaacacagactgtagccccttgtggaccctgctgcttccaagagccaggcttcacagcttcatggctgtccctgccttaggcaggcttctgctgtgagaaggcagcccagggccctgtggctggtttcaacctgtcagacaccagatatgggtgcctctgaccccagaagcaccccgaatctatctgggaaagtgagtgacactcttggcatcacatctccaggagtgatgcaatcctggcagagacccaacgtcaactcagtaatggcctcttggagcaaggaatgttctggaaatatcttggtttgcttttcatacagaccctgggatttaaactcgcagcgagacacttgagacttccatttcattttttttcttttcccccaaaaggcaaaatggtgggaaggtcaactggtcaaccaacagtcttggtctggaatgcctaaagcacagtgcgcatgggctctgtcatggctttactgatataactgttttctctatcatcctaataggctaagaaaggtcttaggagccagcatgcttcaggtcaggccagcggtgaggatcagaaagcaaaggtgaactgagatacaagttaaacaccatatggttcttaaaagccttctgaacgttctagaagcactttctaaaactgagccttaacttagcaggtcatttagtatgacagaggtggtctggctggcctctcacacctcactggttttgtgaagcagcctgcttcaggacaagcttgttctagttgtttgttgtagagacctaactgcctgtcatgggtggaaggaagagacactttggcaatttggttcgcatcttggtatatttgttgagtattctctagagaactaacactgttttcagccaggcagaatggaatatgacagggcccccatggggctctgtcgggttcccacagaaggctagataatgatatggacaggcgcaattatgtagcgttcctggtacagaaggaatcctttgttactgttccctgaagtccactcttctgtttccaggcagctcagccaatgtcaaggacaggtcttcgcttggactttgtgtcttttctctcatcaccttactaagaagagttggctcctaataagccaccgtatgcctgtctaccctttcccaagctggtctgcctacattgccaagtgacctcaataacggctgccacttttaaattcacgagcagatgttaggttgaaaagcccccgaatgcagaaatttgaatttgtgatgcgggcaaatgctcttgatttctcgccgtcgcagtcgtgcatcgctgacagtgggggagggggctggggggaggcctgatgtctgacaggtctgtagaaagctttggggggcagcaggtaagttgaacccagttgctagatcactcacctttgttaggtgatcctagcatgtcaccaccgtggcctaaaacatctcagtgatcatgaaacccttcttaggtctggcatctgttgctgcatcttttcagttaatgacatctttgctgctgctgctgctgctgctgcttgttctgctaagggttggagactggtatttgtgatggagactagtatttgtgtccactctcactgtgctaagcctgcagagggagtttgttttctagaactgcttgctttgttttttttttaaatgccagtctaaatactttgggtgtttgtgaatgtatggggtgggtgggtgggggcttccgttgtgtgctttacacaatagaacgacaccttcttttacccttgctccttgctaccagatgactggtttgaaatttctttcccttctgcatactaaaatcccttaccaggtctgaggccctgctctaattaaggcctcacagggctgcccttctccccaccactgagctggctgccagagtgcctgcctgagggccttacaagtcagtgagatgagagaacaaaagccaccagctgagaacgtggttaaatccgagaagggccgtgccctcgtaatcctcacccccacccccttttttctttagttctacaacccagaaaggggaaagaagggttttttttttttttttttggacagggaggaactatgccatagattcttcagagtctgcagggtattgggaaacccacgtgcacagaacaggagtatcatctgggaagtgaaatggggcggtggctcactgagggctcaacaggaaggcaggttggggagcagagaatcagaaaatgggaacaaagggagcagccagcagaggagagcaaacaggaaggctgcttgcctttgaaccttggggtacagggaacaaggaaaatgtagagagggcatagaaaagtcttagagagccctcaggcgtaggctaagcttcatagagacagaaccctaagccactctcttggtctttggataccttgtcgacagtgttacttgattgttccatgttgcctattgggcagcaaccactgatggatcttcataaacgtggtaaatccaggagccttacaacgtgtccctattgggatctatgaggaactctggatcagaagtgtcctagaaattttatttaaactggccatggtgccatacacctttcatctcagcactccagaggtagacaaagacagagttctgaaagctcaaggccagtctagtctacatagtgagttccaggccagaagggttatagagaccctgtctcaaaaaaaaaaaaaaaaacgaaggttctattcttcatgctaagactgccagagaagacccccttccccactgtcctattagatctccaccagcgtttaaacaagataagagggcgtttaatttgtgctgtgcccaagggctgctggattgctacagggcagagactggagcctactgcaaggtttgggagaaggaaagacagacaaacaaaggaaccagtgacacaggggtagcatagacttgatggaaggatatagtcctaggacagaaaaggaggtggggataggagatgtcccttttttggccttgggggcggggttcggccagtgcttagagtagccagagaaataagctgaacagcgggttaaagaatgtttgtgagcaataaacgaactgttcaatgatggtcagcctttgctaagggttagtacgttagggagggtaagaatctagaaatacgagttattttagttctgagaattgtcaatttttttaaaccaaaatagaggttttataaaatggtgtgaccgtggctcatagtacccacagaaatgcccaccgtaagctgctcgtgcaagacagcctcttccccagatctatgtttctctgcatttagctccctcagagcctgcttcctccttccttctcttcctctctccttcctttccttcctccctggcctccctccattcttcccccttctctccctgcctccctccctcctggtgtgtggtctgagcttcttgaccatccccagaggatattctgactgtctgaattgctcagtctgcagaaaggcaggatagggggcatggtaacacttagtctgttgtcttccttgtgcttcttgctcgcctcttccagaaactcaaaccagactcagttgccccaggcagggctctttttctctcactgaaggaactggcctgagaagttgttccttctggaggttgtctgggggagggggggggtcaactgtagactcatatgcttaatactggtttagtacccttccaccaaccaaaccaattgctttcaggtacaggaaagcttggcccccttttgtctataaaaggtcagatagaaagtggctgaggcttttttttccctttaaatgaaaaaaaaaaagaaaaagaaaaagaaaaaattttactaggaatatggggtagggtgtttgcctagcatacataaggtcttgggttcaggccccagcaatgccaaacaaaagaaataaaacttcaacaaattaagtttaaagatggcgttgactttgctggcattgactaaagatctgtgaatcaggcagcacctggtctatagaaaccatgagctgctttgggcctggatgaagagcctacttgtataaggtagactgagtgggaacaaagaggttcacaccaggcttcttcaggtttcttcccttatgagggagggttacagcggagggacttccttatctggccgccagagctagcctacgtcaggattatctactgttttctcagaaggtcaaacaccaacctaattccggtttagtgttcaggactttagtgagagcgactccggtttggttcacctcatgggatccatgaggaagtctgtatcagaagtgtcccagaaaattgatttaagctgagcatggtgctctacacctttcatcttagcactccagaggcagatgaagacagagctctgaaagctcaaggccagtctagtctacatagtgagttccaggctagtagagttattgtgaccctgtctcaaaaaataaaacaacaaaaccagcgagttgaagaaatgctgagaatgttacacagctgtttatgtaacaaagcaaaatgtagatttccacaaactttgtatcgatgaaagaaaatataaaatgcagtattaactataataactataatgggtatggctgtgattgtgtctacaccattatgggcaatggcatttgaatttcatatgatttctcatcagaaaatgttctttttgacactctacccaatcacttaaaaatgtagaccttggcctagagagatggctcggttgatgaggagaaaaccatgcttttgcaaaggacccaagccggattctcagcacccaccttgctcacagctgtctagagctctagaggcagaggatacactgcctctggcctcctccggcacccgtgctaggtgcacacacccaacacagacagacgcatattgtgaatacacaaaagttaaaaatatttttaagcttaaaaaatacaaagctattcttaggccatataaaagtaggtcacaggttagattcatatttgaagagctatcccttccttccttccttcctttcttctcttccttcccctccttccccttcctccttttattgaaacagagccttcctttgtatcccaggctggatttaaaatcatggtcctcctgccctagtttccagagtactgtaattacaggcatagatgatgattctattttgtaaattataatctgttctggggaccaactagccagattgagtcaatatgtcctgtttaatttctaataaacagtgtgtgtgtgtgtgtgtgtgtgtgttgggcatcttgtggcacacgtggagatcagagaataagttgtctggggatcgaactctggtcatcaggcttggcagtacatatctttatccacagagccatttcattggccccaatttcagaaaacattttctatttttttgtcttctaattttattactttttcttagaaagctaagatatacatactgtgaaatagttagaaccttaatttcgtcttagaaaagaaatgcttaaaatacctaattaaaaatattaaaaaaaaaaaaagaaagaaatgctgaactacttacatagggctaaaagaataatgtctgcagccttcggagattcaggagagagggaaacgggagggagggagggagggnnnnnnnnnnnnnnnnnnnnggagggagggtgagaaacagggaaaggcctatcaccatcctcttagttcttctggaagcttgaaatattcctttttattaaaaaaaaaaaaggactttaaactgtagattattgaaaccatgtatagctgtgggggccaaacccaagtgccaaatgccatcacgtctcataggcaacatatgaatttgtccaattaggttattaaacaagcacaactgcaagtaagtgtcacacagtccctctcatccgacacttagtttcccacactccacaggcttccccttcctctttgatccttgctgccttgtggaggacatcttgtgtgggcttaaaaggcaacgttttagtcttgtgtagttgctacattggagacctataaaaaaacgggaaaagggaacagtgttaaactgccccataaccttaatcagaaagcgcatgcagtgtaatagaaactttgtgggaattaaacaaaatgagacagaaaacaaagacagcttcctgggcaaggcctaggagctatggcgtaaagatgagcagatagaagggtaaggagacaaagtcttagattctcctttttcctcttaaaatgcattaaaatgggaattattacaaagaaaacatcacatgtagtaatttcagaacattgtaaaggaaactttacagaaaagagcgtacttatgataagatgggatgtttccggaaatttccaaatagttcccccacactcagaaggatgattgagagtctggttatgaggaaggatggaaatttttgaacgactggcttattacataagcttcaagccattgctgtgatagttcagttcttaaaacaatgtgaggaaatatgcttgcttctggagaaatatttggctcccatgagaaaaaattgcaagtgtttgtgatggcccgctagaggtaaggagccatccacacactgactcttaaagccagagccaagtttcactactcacacaccgttgacaggatctgatcaagacacttccccgaacaccctggagtcagacttaggtcataggtcccaagtgaccctagcagatcaccaatgtaaaaccactataaacaacagaagccctaactcagaatagttaaccttcaatgctcagacgtgtctgaagttagagagcacttacaatgctaggtgctattgtaaatgatccacgtgtattatttaattcaatttaaaaaaatcacctaggaggtagacattaatactaaaacatattgcatgttaggtaccaaagctgaaggtcagagaagtggccgtacatagcaacaaacctaggctgtcaacacaggcctgctgaatccagaaggccaaccaaccttgcccgctacctcccaccggtcccagggaatcagccacagccatacagcttacagacttcccagtctttgtgcaccagttttcccgaattttaaaatcatcttcagagtttctaaaagcctcaatggaaacacaaacaggcaattagaccacgagtttcttcagttttgttttttaaggctggtatctaccattgccaacaagttagatcaggtcttgtggaagttctcattggcagttatgtagacaaaaacattcaagctccctttttttttaaggggaagatgaatcattacttaatacatgcagtttagtggagttaatctgtgaacactggcctatggagcgagagaataaaagggtgtttggcatcgagaaggtcgggaactgctcgttacatgtgtatgcacgttgcccaacctgtcagccttcacaactctgcatttttttaagtgacaccattcttcctgcatcgtttatggggctttactttgcatatagtattaaaaatctactcagctcaccaaaatgatcatattcttaatgtttggtcaaggaactggggtgcataaatggcaagtactgtattccaggaaaataccctttttcaaaaccttaaggttttgccagggagcgagtcgttttccaaaggacacacacacacacacacacacacacacacacacaaaatcaaaaactaaaaacaaacaaaaaatactaaagactcaatgctggatggttcaaaacaaacacctgcacttaggtgtgcgtggggcagtaggtgccacactgcgaatctgtgtgggaaggatgtcagcgggcagtcggtggcttttatttttttcattgcatgaaacagttcttataccatggtgggaaataatccaggcgtcccctgacagccatgagaaagcacaggtgacaccctgttctcagaatttggtgcgggttaaaactgcatagggtgcccggggcctgctcggtggctgcgcagcatctgtgcgagcctggctctgccgcagtggcgccggggggtgcgggagcctcgcggcctgcagcgtcccggaagccctgcgcgtcggcgnnnnnnnnnnnnnnnnnnnnggggcgtccgggcccagccgccggcgtccattttctgggcggcgctgcggccggactcgcaggtccggaagcgccatggaccccgcgggaagcgcgcgggcggcggagcggagccccgtaagtgcgcggggtccgcgcgactccggggcgtggaggtggggaggcgggagccggtgggcagcgctcgcgccgggctgcagcggacgcggagcggagcggagcctacggagcagccagcgtccgcaggtgcccgcgtcccgccccaccaggctcggctgcaggggggcagcggggagtgacgcgcacctggggctcgggactgtcgcgcctcccctccggtgaagcgcaaacccgggctgcttcctgaccctacccgttcgcgatgagatcctagtgcgacaccaagcccctggaattgaaccggatgttcaaaggcagggccctgcctccaggggttgcagccttggcctcctgctcctgcttgctgcagccgtctgtccgttgggacaattcaacagtcagcctttagacacctctttgcaggttagctgataaataacctgagattttaatctgtctgcgcttccactttataactcctgctttgcggtgggtaagtgcctggttcccattctggatattgggcctgattggaaaacccttgtaatgatcggttctaaatgataaccgtttatgttgcgtatgcatatttgaaaggttaaagggcattcacctaattgggaagctcaagtgcttgctctggttcgcgtggctggaaagactcgttttgttgtggtttcagagaaacttatagcgtcttacagtagctaagatcaaagagcagagtttgtgttttgtgacagggtctggttaaggagcctagaatggttaataggttagcccaagctggtttcgaacttgccacttgcagcggttgactgactgctaggatgataggccttctaccagtgtttttccaggaccaaacacgcattagaattcctttgatgggtcattgctgaaaattttgaaaagattagaatatatagtgcgaaaagactagaaaaagtaaccgttgcacacagtacagataagcatagtttaatgaagcctttggcttatataacatcatttgtaataaaatgggtcactgtcaaaaaagcctttaagactccaatttagcgttctgtggtggggattttgcacccaaatcagactgggtttgtgctgatgttaacctgggtttgaatcccgacactcacccagggtgacctccagaaacaggttcacggcactgtttgcagctgtaaaatggggaactgttccctacagctgaggggtgttacggagatttacccatccgctgagagcacttggtggagttcccgatgtcctaaaggcacctcacatatactaacggcaatgacttttgtggctgaaatcctgaatcctagacactcgtcctgaatcctagacactagtcctgaatcctagacactagtcctgaatcctagacactagtcctgagtcctagacactagtcctgaatcctagacactagtcctgaatccctgcactttcatcttctcttagatcttgatatggaagacatggcgggctcagaaccaaggatttccgagtgatttctgccaaagcacagaagctaactccgtcaaggctggcgtgttctgaggtaactgaggtctatgtctttccttagtcagcatgaaataagaaatggcagtttctaaaagaatcctcaaggttactgaatcatgagttcgacctgccaggtttgtgtactacgaaatttccacgactctcaagcagtctgttattaagaacacacggtgtgccaggcctctgtgcagagggagaactagcaaacgaaacttcaaggcaacaggctcagctcatgttagctctactggtagatgtgatgagaacttttgtgtgtgtgtcttgatagatctgtggcttcctcaagtcgtaaggatccgaaaacaagatggaaggccggagtgtttaactgagttgttgttgttacccgtggcgggttgaggccagggcagacatgctgccagcttctccacttgctgtagagtgagccccctgctagcggtagagtatgcaagcatgaagagacatttgtgtttctcacgcagatgtcctgacaggccagcacactaagctctaacttatatgtggttccgaagtcctaggcagtgacagaaacagctaccatttgtcaaacgattgtgtgtctttatgtgtcaggcagtgtgttaataatttactcctctgggggctggagagatggctcagcggttaagagcactgactgttccagaggtcctgagttcaattcccagcaaccacatctgtaatggaatccgatggcctcttcttgtgtgtctgaagacagctagagtatactcctataagtaaaataaataaatatatttaaaaaaaaaaaacaatttactcctcaacggtactcctgagagtggaggcagaagaaatgtatgggattgaaatgtgcagaccgtagcaggccttgggagtagcatggcgtgggaggctttacagccagcccttgctgtactgggcgcagccttgcacaatgctctgctggagccacaaagtttgcagttaaatgcctgtcctccagaagcctgcagtctaaactctacctgaagtggaaagaggcagagttggtgggcaagcccacagtcatggctctccctaactgctcctccttccggcagctacacaatgccatcggtcaccgggacagaccacagtcgttgatgtttcaaagttcttgcttttcaattcgaattttaattcttgtccacttttaacatctgttagacttgtgctttcagttgatccacaatcataaggcctctggattcatttattattttatcgaacttctctgagattcttgggtaatcaaagagatttttcacattttagtctcgtccagtcttttagcaaggaattaatttgttcagctgtcagcgatttgctattggtaatcaacataaggatgctggagagtgatttacatcattttcgttttcaaaatgaaatctaactttaaaatgttcattttttccgtttctgtcacttgcaatggagaccattttaaatttatgtacgttacccataggcagagaggagaggaagcagtttgacgagagaagttcaaatttggattcaaaacagtctcttggctttgtagatcagacgactttggtggttctaaaataaagcaattgaagacacacaaacacttttgtgtgatttatgggctagaacaccaaatggcagccccaggaactgcattaagccctagaaatcagattacaggacctgaccgctacttgttacaacataagtctcttacaaaaacaaatgagaccacggatctgcacacgggcttgtgaactatatgaagtcctataaatgttaggcagcaaatatttatcaaggtgctgccataagtatgaccccactagagggactagagaattcaactggaaaaaaacctcacacttccccctcagactgtcgatagagcttgaaaagacaaacaagaaacacacacgcgcgcgcggtgtgtgtgtgtgtgtgtgtgtgtgtctgtctgtctgtctgtctgtttccaggacgtaaaaagcaatctggtaattgattggaggatgcttttgcaataggaagagaggaagactgagagagcacagagtgcatccatgaaaagcatcaagtccagttgagttagaactggtctgtacaggcgtccagggcaaaatagaactggagaatatgtgtggttgaacaatagtggtcttgagtgccaactaggaagttgggatgtgttaatcagcagtgtcctaaaggctctttgaacaaggaactgtagtggctgtacccgaggagcctatccttgtgcatagcttagaagaggttgggaagagaggaaattaggaagaaggctgccgccgtcctcttaagaaaacagttgggcccagagtagcaagcaggaatctgctaggggtagcaagtgggcaaatgagaagaaatggcactcagctgtctcactggagaaggagtacctgatagcactcccagagccgtggtgccatggggaccctgagaaggaggtgacgagttgtatccatcctaggggcactgaatatatataaggtactcacgctgccacctttcatctgaaccccttaggaaggggaaggccagatctggagctattggtatacaggaaaagatgaagaggtttcccattagagtgtaggaagagtgtggttgactatcgagccttttaagaaaagaaatgacttgtggagccagaaagaaccctgtcaggagagcagaaaacctcagaggaatgtattcccagaagcctctggaacaaagctttccttgagccgtgggtaggagggatgggcccaagaacaggagactgacaaacagtgcagtgcactatgtgttggtggccattttcctttgcaaggtaatatgatacgcacaatgaatattaagtggcttcgtttgcatacgtttctagcttgcacaaatcgagaataaatcctgcacaaatcgctgaccttagcgtgctcccaaacactctcgttactaaaattcaggctgcgaaatgtttgatggtggtattcacactgtgtgcgtgttaagagcagacagatcagagaatctttcttaaaagaatgaatggggggaaaaaggaataccgttccgttgttgcaaaaagtttccagcagtaacttaattccattgcctttgagcttatatctattaaatactgggtctgtttttctgagcatatgagcttaatacactggaatgaggagacgagagtcagataaacccagtctctcgaaccagctgggccattttccaggcttgtgaggtgagcaaaatcctggtaagctgagtttttccatcctaagcttatattggtctattttgaaactgtgagtgatcatttgagcagtagccacagcatggcaggcaactgataaatggtgagtcccgtcctctctcaaccttgtgcacataggtgtacatttacgctaagatgaagctgcactggaggccttgtctcccagtttcattttagtgtatctattaaactgaaaccaaccattacactgttctatcctgtgtgtgctgaagtgaccaggagtttagtatggatcaaggctttaccagggccgtcttaagagatggttaaaagcacttgctattcttacagaggacttgttcccagcatgtctatggcagctcacaatggacggtgcctccatttccaagggctccgcaggcatgcagggtgttagggaatggcaccaccccaccttccattgctccctgctgcagtgtaaccacagcagccttcccagctctgtgtgtttgtgtgaccccagaagcctttcatcagctctagctggattgtgattggctcccagatgtagaggaggatttcctttgttacaaacacaccacactgtctgcttcaacatccatcttctggtcctgtggtccctgacatgactcaaatagccattttctccactgcctcagagctgagtcacacatctgtttgatggaagtgtcacagtcacaccctctacgtgcttgttgaatcacacctcccgtatgtgtccccttcccctggcagaattgggtttcacctttgctttcatgggaagtgacaggagagggatcgctctgctcactaacgtgggtgactgagcggagttggttccagggctgggccttagcacccggccgtccttggggcctgtgaagaaaacaactctgaccttcagtttctttcctaccaaggtccagtgattctgcagtgtctttagcccccttctccatgagttgccctttttgcacagatgtactgtccatcacctggaaggacacatcctttcctaaatagaaatatacgtccaagtgaactcttaccctgctttggtgtctatttaatttctcagcgtttgtctttttattttttgtggtgttttggtggtggtggtttttttttttttttttttttggttttggttttggttttttttttttttctttttgcattttaccagaaaaccaattaagagactttttgtttgtttgttttaagacttttttttctgtttattaatttctggcaaattgctttgcacttctcttcaagaaatacctaccaacgtggttttcttcttttctaaataggagtcttccttttaatcctaacaaccgaccgtcttgcattaaaaataatgtggttttccccaagaggctccctggctcgggagatagtaaaagctctgatgattacgtaccagggtattcagcaaaccaatccagtattggtgggaaaggatggttctctgtctggagggagagtgtccccagaaggtgccccgcctgtagtgtgcaggcccagccgggtggccattttctgcactgagtgtacacagtgaagctccacccactgtgcagcccgtgagcctgttttctaaaacgaaagcacaggcagaggctggagtattcaaataacacaacctgcatttaggttatttttagatgagtacacttaaagcacacttgctctaagcagcatcccgtggctttgttggtgatggcttgggtttgtgcgaggagttttcctttccttttttttttttttttttttttttaccatgtagatagattctctctcgaacttgtggacaggggaactatttaaataccaaaatagtgccagaaacacgcattcagagttttgttgtggtagagggattacctcttggtgtagcccaggctagcccaggctagggtccaactcatgatcttcctacctcagcctccccagtgctcgagtgacgggctttcgacatcacccctgatacattctgctttaatggaagcaactccagggtggagttggcaaaaagccaccccaaaatgtacttcttcatattctattcctctcgtagccatttttttccttcttgtttttcctcagtctagactattacgcatccatttgtacgctggccagagtttctgtagcctttccatagtcaaaaaagccatgcgtgtgtctcctcggaccttctggtgtgcctgttcagcatctctgcagaaatgtgtgcatagggaaagtacggacatctagggctccgtcctgaaccaatgctgctgcacctcgacgccctgggtctagaactctgtgggaaaccatggcaaatgtgaggctgtcagttgaaggcagagagacagagaggaggtgaaagcagagtcaggcaaaagcagcagagtggtctcctaggaattcccagtgcacggtgaccactcagactattctccagtccgaaggggtcagctctgtgtctccatgacacctctagaagagaagctggcctcctagcgttggcttcttctattcaaaggagtggttttgattcgtgtcttggtagatctgttttcttgtgctgtcccactcattgtcttgaagctccgaccgccaggctctgttctcgctgtcattttgtccttgtcatattagggagggcacggcgatgcagtgggatgatgtcacctcagagtcctctcacacagttcgagctaaataaagtcctgtgtgttactcagccatccctgttccccgtcacaccacctgctcaaggtggatatgggtggatctgatggtttgatcagcacttggagctcgaggggaccccatcctgaaaatgcacagactctgcctcccaggattctcgggttcgaagtttccctgtaggaacaaacaggctgaaaggatgctggagaaccagggtgtcacccacatgcagtgcatgtgaaggctcatggaaaccttgggtactgacatgtcaccattcaaatgttaggacaatgagtcgctggacagatgaaattttaggaacagaataaaatttgtagtaacattttggaattttggtttccttaaaaacccccgaaatattataagaatgtgctttggtgttcttaatcccaggtgtgaggccgtggtagctgaccatgatttgcctcatgctttagcagaggcatggttttgccagctgcagagagtttctgcgactgtgtgatgtttggaattctggagacttttcagagggtgtataaatgtgagggtcccaaggggcaaagttgttggtcatttaaggggcttgtttgcagtttgtttgtagccgtggtcaaagaagaaacaaaagagaaacattagattcagggatctcttgcccttctgtccttgttcccctcctatctgtgttaagagagtgaaaccgggggaggaggggtgggaaaagaagaaaaagcggtaagaccagctgcaaaaactgaagtaaacttaaacttacattttatagattaaaatgtacataaagctcagggaggtaatatgaacagtaaacacgggctaataatgagaggataagaagtagttttaatgctgcaagcctttatttttaagctttgctttgcttcttcggtgtatgagtgtgaatgggtaggtgcatatgagtgcaggtacccccttatattagaggagtctaatcctctggacctgcaattataggtggttgtgagccaccacatgtgccactaggaaccaaatttgggtcctctgcaagagcagtacctactcttaaccactgagctatctctccagccccaagacttttgaaaattactgtgcatacttagagacttaccgccatggtcagttgtggattttattgtacactgtctgagtccgcccatcaggaccaccacaatggcagcctgtacagtgttttcctttagagcactggcttgaagttgtcccaggcctaacccaaggaaagataataaccattgacctctccttctccatgtaactgcatataaatcgcccacttcatatataaccgtgcccatttcatgtgagcaaaattctttctgtaagttctgtaacagaaagaaacatatgattctactatctggagaggcatcaggaacatgtggcagcctttgtcaggctgcccagtactgggtgacaccggaggaacccatcagaggaagtccctccttatctgggctgtcactcccaagggagcagaatggagccaggcatcaggtgataggtaccaacgaagaaggacgacaggcatcccccgacagatgtgatgtaaggtgttcacttagcaaggatgttcactaagcagccgaacagcaactttctgagttgtccaggaattgtcagaattgtcccctccccttctagtaacactttattgaccatcgccatggagtatggaatgccgtccctctcttctcagcatcttttagtggctccttgctcttggcagcatgtcatggggtgtgtgcagcacttggcacgagaccttgcacacagaaagtgctcagcagatgttagcttttcgtgtcactggctttcatcctctccatcatagctattaccctttcagcagaggcaggcaccgcagcttctgtagaccccacttaacccactcgtgtagacgtgaatgaagatggagcacgcatctaaggcagtgctgtaggctcagttctgtttcccttatcctcttttcttacagctatcagtcttcttttgaggctcttgagcacttaaggcatgtctctgtcattatatgaggaaggctgtagggtttggtgtccagcgggtcacagtagggagccaggatgtgtttgttccagggatttgctccaaggtgtgctgctagatgagaagctatcagagagtgctgcagggaagtcctgcttggtcctcagtgtggaccttggcctggcagtggggacgtgacctgagatcttgcctcccacaccactccagtcccgctatgtggaagaatgcacctaagatttccctgactcctgtgaggttatcctttggggaacgttgccatacgcagaggcaaacgtgtgtagacgagtttgccagcttgctaaccagaacctgttttaaggacaatcttcgaggatgtgggttggattccgtttagaaatgcatgctggagtaacagatctcagtaagactcaaattctgaagactgttgaagtggtttccaagaagagaaatttccgtctgaggggacagaaagcctttctgtgtgtctgggaagtaacaggaaccattcgaatggaggattttagtaaggggagtgtatcactatacagtaaggggagagccgcttcctataaatgtggcgagaaggaactcagtgctaactctagtgttggtgactagcagtatggccgcctgatccgaagaaaacaactaagtcggaaataatcccattctgccatgatggcttgtccaaacttcaagtgcaagggccgggggaggagcatgccactgtattttagagaggaaatctgagcttcctgtcaaattaatccagtttggaaaatgaactaagtcttcggcctctcaaagtgcttgcctccatttagaaggcagcatagtcattttaactctattaacctgtgggtgtttccccgctaacctgtagtactttccggtagcctttgccctgattcttagccccatggagtctcccagtaccaaggagtgcttgggagagccgccatgtatatgagtggtctctgcgatggttagtcttccttctctgtcagctgctagggaactcagcctgcagcttctggatccatgcccttcgcccattcatccataagttatggccgtgacggtttcactgggctgaatgataaggctttccaaaagatatgcctacaacccagaacctgcaagtgggatctcatttgggaaaatgatctcatagattatcataattgtggaactagaaatgagatcgtcctagatgatcaggcagccgcacagaagagagacacacacaaaaggatgagaagagaaaggtaaaagtgagggtcctgtagccataagccagagctaaaagcagcaaggaaaggctctgcgaatgccctgtgatcaggagcctgggcctacaaatgccctgccaggctctgtcctgggttgtagagaataaatctctactaatttaatgcccaaatcacctttgatctaaaaacatctgggctcctgttaaactcagatttactccaggctattccagttcagggtgacagctagaaacagtttttaataagggtccccggtggtggttctggtagcttgcctgttcctctcgggctcctttgggccagttgttttcatgcaattgaacaaaatccacgatcacatttgcagccccccaccccatgtcagtgcaccgttcagttgctccaacggccaagagccaccgccttcccaaggctacttagagggactcaggcttcattaacctcttcccacactagatctgggatccctacctgctaatggctactcggccgtcttttcctctctcctctaatgcctcattaggagattctcccacaccgatgactttgaagcctttctcatctttccactatgcagttagggctaagagtgttaggactagagggagagtctaggtcctcatgacgttgacattcctgtctggggccctgccattctctacctctgcatctcccatcagcccctgggaagcagcctatctctctatccttctccggatgtgtcactccatttcctggctctgtgctgcttagtcctctgcctggagttggctacagtgttccctcctggatctccgggactcagctcctccccctttccctgacaccccccccccaaactaagctaaggctcccccctcctcaggcctggacatcagatataggagtttctgctagcccattcatgaagtggaaatttctggtttttttggaaattcagttgtgtcatatgatgtttttgtggaagctgtcttgtgagagggcgtgtgatgttttgctgaaacatacacttgagagggagtgtgatgtttggaaggagtgtaagtagaagcccacagacaatgaaaggcccctcttgcattgtgacactgtgcaacactttgctggtctttgttggccatgcaatgctttgctggtcttcacttcatagaaacacaccaaagaatttctcatggtattccagctgtttctggtcttctgctgactcgtgcaggcatagccttgcgatttttgctagattctaccaccgcttctgattcgtccttggtgtttgttgttgagctagactgctggtatcctgacaacaaagattggtatctaaacaggtctacaacccccttgtcctattaaccatctttctcccgtacctttggtcggtgggctagaagggagcttaaatcggtcaagaaccctaaataaagtagctttgaaagatctaagcctacattatttgttccatgagacagcccctccaggaggagcagaggaagaaatgaaggagtctaaaaggccaagaggagggaatagttctgtttgagtcagtattgcctgagacacttgttagtaaaagttaaaagtaggtaattttagggagtgcatttaaaatgcataactagtaatatgtcataccattgactgagcattttcttgccaagatctatttttaacataattaccattatcatcttgggcattgctgtcattttacagaacacattaaacaaaatgctgtgatcaggtaatgaagaagcaaagccgagtaaggagtgaccacatgctctggggcatggtgatggcgtccaggctggccagcaaaaacttaaaggcccagaaatcaaacatgctagttaaaaagagatagtggtttaatgtttactaacattgaaatcacacacacacaaatatttttgaaactcagagccacacaaccaagattagaatcccatccttgctataagctgtatagtgctaggactctggcctaactcacctgagcctcagcgtctccttttggaaacatcactccatagctgcatggacatcacatgaaggaaagtgagttggtgtgtatgagagcgtttgtaagtgagataggaccaccaggatggatacagctgggcgcttttgcctttgttgtgtttgagtccacaaagttggcctttggaaggagtcaggatggggaaggaggtattttgcttggtaagcagatattggagctgaaacaatcacaggctgtctggattccatagctgggcagagcacaaggatgctgcgatcacaagatgctggggctgggtttgagaggacggaggtggaaggaaattggtccaacacttgttgagacagcgagtgcagagtgcgttgtttgtatggctttgcactcactctgctaaaaggagcagccgagctgcaggtcactcgctccaggtattgtgagacctttttcttctctcctcctgaggctgttcctgcagctctgaagcttcctggatctgaggtcaagacctcacttacctcaagttcatagtgtctggaaaccatgcatcggagtcgagtcacatgctggccgtgtgacttcagccaccctcttttggaaggagactgaggctttatcagtcctattttgaaaggtaaatagaaaaatgtgtcttaaggagtcacggataaacagtattgacaagcagagtgcatgcaagaacatttcccttcatgcctgttagtcagcagtatccacagaggaagcaggaagcagtgtggcacatctaagcaacctgtcatgtcctttaagatacggttggtgctttcagcatgtcagcaggtggagtgggaatgagccaaatgaacacatttagacagtaaaaataaacaggaaattttgaattttgactgtaaatctcagtcctggacgtttggaaattagagatggcagaaaacttccttgtttgagaatgaagcctctgtgcctttctctaaaatacatcaccaaaataaagccgacagcggtgtttgtatttcctggctgctgccgcggcatgcttagctcctgtctgatccagcactccggaagcagcctgggctccctctcacaggctgaagcaggcttagtgacgtcaggcagtttccaaggtcagagggtacagtcctggctcagcagtttgcaggcccggtgcagggaggcctgtgaaccagaggtctggagatctgtttccctcagcttctctgtaacattcgctttacaagggaatggctcaaggaattagattctagtcaggaaaagagagacctcaaaaggctgtggtgggacaggggccgcacttgaggatcccttggggtgaagtggaacaggggctgcagttggggtccctggaggtggaggcttctctggatgaaggtttcacacggagtggggcagcctcagaccagctctggaatctgtggagtttcagtgtgggctcctcccgtgcctgtgagtgcccgagtgaaactcttctgccttgttgaagcttttctttcttcctttctttctttttttttttttttcaaatttactgttcttgttttgagagacattttagtgggagtgggtttgccagctggtaaggatgctagagtgtttctttgggtatgttctatcatcttgtaggcgttgccttgtgaaccggaagtgggctttggtcgtcatctacgaaccaacccaagttgcagccctgacaaagcgtccatcagggaagggctttgccccaggaactacagaactatgttagtgatattgtcatacagcaagtaagttagccgagctcgagcagagcccaggtactacagtaggcaggggccaactttgccttcagaggagaaagatcatcacttaagaaaaaggctagtccagccaagcgaggattcttagaattactgcttaaccccggcactttctgatgattctgatcaaagaatttgatggcagttcaaagcgtaatctacaacaacgtacagaactgtgctaaacctcaaactgaaactaatttttttaactgggcaaactgcaaactaatacatctattaatacttaaactaatatatacactatattaacatatagtatatatactctatgtgtatatacagtatatataaacagcatatatttaagtattaatatattgtattctatatatagtacatatactgtagatatgctgtatacaatatacatactatatatactgtaaactaaattagcaaacggctaaggtcttatgatcctagatttaagcaagaactagctagaatgtcccaagactgcactcttaaaaaaatccctcctgtggggctggagagatggctcaccggttaagagcactgactgctctcctgaaggtcctgagttcaaatcctagcaaccacatggtggtcacaaccatccgtaataagatctaatgccctcttctggagtgtctgaagacagctacagtgtacttatgtataataataaataaatctttaaaaaaaaatccctcctgcatgaagacaaaggagcagaggtggtctgtggagagtataaaagtaggtagttaaggtaatgagacacagtgtgggggaagggaagggactgctcttatctgaaataagtatagaagattaaaacatatcggtcttgcaagtgtttattcctaaatccttagccaggtttgcatgagcctcccatggaagagggaaaatgcatgccacagaaatgtgctggtcatgtaagcagttgtctcgttggcctcttttctaccagctaacaagtagttaccttaaaagactcttgttaaactgctaatgcccacatttgcatcagcctagaagaaacatgagcagttcccatattctgctaccagtactatttgaccactgaagaagctgtagtaccaagagattgaagtcacggcaaacccagggtgaccttacaccaaggtcagagtcccacagtgccagcctgcctcatcctaagttctccttcggtagacctgtatcctatgagtagactacgtctaggcattgaggtgctctctgttctcctagattagtgactttcacccccactctgcattctctcttaccccatcttgtgttagcccaggcgttaggtgcaataggtagtagggtggtcagccttgaaacaaaataaaagctaaagtgatattcaactgatatatattacgtttaggttgatgtatttttaaaaaatgaattaaaatgttatggaaaatgctgattttcccttatatgttcttgccagggccacctgtgaagcatatggtacctttgtgcataaaaaagaaatgggtacaagcagaacatggagcacccagctaccactgggtataaactgtatacctagaggcacatggtggctcagttaggatacagtttgtaaagcgtgtggtagaaagaagactgataccatacaggcctctctgggactgcagttcccagtacacattgctccatgcatcctagaagacaaggcaatataagttctttctttcctgagatttatttattttatgagtatgcacgtcttgcctgcatgcatatgtaccatatacatgccttgtgtccacactggtcagaagagcagagcagatgcccagaactgaagttatagatggttatgagccaccatatgggtacttggaagggaagttgggtcctctgcagaagaagcaagtgttcttaactgctgagtcatctctccagcccctaagcctaagttcttattctgtcttcatgttcttgaacttgaaatgaaaaaaatgaaaatcacgggttttgggtcagtctgtgattttaatcccagatctaaatgatcttctccaagctccacagtctctccaagtcagttttatcactgtaaaatatgatcgccattgggaccgacgaggtggcacagcaggtaaaagcgcttattacacaagtctcatacctgggttcaagctcctggacccctgttaaaagccaaatgcagtgggacacatctgtaatcacagtgagatgagggatggagacaggaggactgcccggaagccaatgggccagctggcctaaatagcagcaacaggaaactctaaagtaggccctgccgcagcaaggtgtcttctgacctccacatatacaccacgtgtacacccacaaacagtttacccaagcagcaaggcttaccggggtaacgtatgtaatgtgtacaatggtgctaggcacaagctgtgcttgtcccgtgttgggtccagcataaagacgacatatttacctgctcatcttccctgacagcaggcaagtcttcggtggggcttttgatgcatccatgaagaatgtgaaggccattttacagtaatacttagaaaagctgcccagaggggctccaatataaacacacatgagaatagtcatttatttcataaagtagccagagtctgcttctgactcgagggcacgccataacttctctaaggatgccaagcacacagtgggatgcaagcatggcgtcccgactccaaggcccgacgtagcgtcagtgaccctgctgattctttctgagtcctgcccttgcatccgattgcacccttgtgctgagcaccacctcgagaagcacgtactgccgtgcatttttcaatttactgttggttgcctcacaggggaagttggcacacgtgtcttttggttaagtcacataccaggcactggtatgcacaggcacccacagtcctataacccacaagtaggccacaggcccagcactggatccaaatgagctactcgccgtaaagaaggcaggaactgtgctcagaaggcattaaaatgactgccaggagctgggtgagtgccagaaggaggaggccattcggaagcagggagccacatgagagcccgagagaggaggccactcggaaacttagttctttacacacccctaacatcagttatacatacatggggccacctttatattttcagtgctaagcactttcttaaaaccttttagatatagccttactttgtagctctggctggcctggagctcacagaaatctgcctgcctctgccttctaagtgctggggttaaaggtgtaccccaccatacttagcctggaaattaactttaaaactgttgacaattcattctaggtatctgagacaaaggcctagaccatgggctctaagcaaaatgttaccatagagcttaaaggactgttttctcctttccttccttcaagtcaaagaagtggtactgttagcttggggtggaaatggccctggttgccagctgctgggctgtggggaagtaattggatcccaagggctctgacctcctcagtggcttactccacagatgaatccatattcatgtcatgaatccataacttgacagcattgccaggagtgggtgggaaccaggagcctgggcaagtttgaagaagtaagtcaacgtgctcggtcccagcaccgctcacccattctgctccctggctgccatggctgaactgcctctctcctctgtgttcttcccccaagatgtctgcctcaccaaacatggactgaaaggaaacgggccaaaacaaatccgccctctttagattgtttttgtaggtgtttgtctcagagacttaaagctaacacagtatcttgttcgttattacaaacttgggtgttttgacttgtgcgtgcagagtatctttgtggatcgatagccctggcatgtcccatgcagcccagctcgagtggtgtacctggcaggcagatcccccaaaatgatcatttgtcggagtgcttttccttttccaagtcagacagctttcttgactttctcgcacttgcatgttttcccccagtagcacaggagatagcagagatgtccacactgccagggctgagccctgtaaactgggaacagcaccagcatcgctgcctagtgctgatgccgtaataaaggaaacagtagtggcaattgcatagctgaacagtctgggaaactggtaaatagtctcagccctcctagcatctttactctgtagtaaggcatacactgccaagtaacttttaaccagtatactggaaaggtaggggagagcctgcatgccaagagtgtgcagcaattgagtggtttctgggaagagggagggaatgtcagatggagaccagggtggcttgcattctgggctagaaggtattctaggttccagaagcaacacgtgaaaagggacatattagagtagcagaaaaagaggttggatggtgaagaaacctcataagcctttgtaagaatgttagcatccacacacaagagtctaactcttctctggcctagagaatcttccatatctcatgaaggaggttcagactggaagctggtctccatgtacagaatcaatctccctctccctctccctccccctccccctccagcattcttctgaggcttcccacagttgatctcatggtacacccttactagaacctcacagtcctcctcttcactgactgtagtaaaagggtcagtctatactctctgttagaggaagcaccaaagctcgccttccttcaggccaggaaatctgggctatgtggatggttttggggctgtgcactgaacactgactgattacataccaggctacacctggaaaatgcctttggtacagctgctgtaaacacctgcactgctaagggctccttggcccaggacatcatcaagacccattgtctggcaaggcccaggttgtcctgaagagtgccgtgagggcagctctggccctcatcctccactgccccacttgagggcccctagagcatattcctcagcagcttccagtgatctcctgacctgtggctcactggttattatgacagcccttctgcttaaagccttacaggtccatctctgcaggcttcttcagcggtgatcctgtgtgataaacttgcagtttggacccagtgcccttttgcctatagaacaagtaccttctagcaggctgagcaccatcccccatcagaaaccacttcccttgttatatgagtaactgctacgggctgtttctccatctctcctatgagcgtgacaatgatacagcttctatatctcaagcctcgcctcagttcattcatttactcctatcagggtatagtaatcttttcattttgtctggtagaatcccaggattgtggtggacattaaatgagttaatatgcagaatgcttcacaacctgaaatgtactgagaaaaatagttattgagagtggatttggggactggagagatggctcagtggttaagagcacttctctgctgagaagccaggtttggttcctagcacacacatcggatagtattcaaacccttgaaattccagttcaggagatccagcaccctcttctggactccagtggtactgcatatgtgtcatgcacataaactcacgcagatacacacaaatgtataaataaaagtaagtaaatcttagaaagcaaagtggatttggataatttagaagatgaaaactgtagtccacaacaactgtctttatgtagtaatgatttataaacatatacctatttatggtaaaaattatttagtttttgagtaagtatttgccaagggccttcacatgtcaggccctattccaggggcataagatccatcagtgaagtcaaagcttgctgcactgtggggctgaattctatcaagcagaccggtgggtggtcaatgtaagcagtgtaagccgagtaaacagtgtgtggtgctggactgcaccatgcgctgtggatccagaaggccgtgggggtggatggacatgcgagtacaggaggtagacctttgaattttcatttttgcttgattctaagacaaggtctcctgtgtatcccaggttggtctcaaacctatgtcgcctgctacttgttcagactcccattcttccttccttaccatctctgtgctgattccaggcctgtgcggccacacccggcattgcaggccgggtttctcaccaggctgagccatctttgctttatacgcttttctcgtcttactccacaaaacctgagtggcgtctgtgtgtcacacgcagcaagagtagaaaggctttgttccttcctcccacagctcactctacttcctaggaaggcagtgaagaggaaacagtggccccccctttatctacggttagacagtccttcgtttcagttatctaaggtcaggtatactctgatcgtatgtaatggaaaggtctagaagcaactcatgagttctaactaactcttattatagtctgtttaattgttaaattacgattaatgtctaattgtacctaatctgtaagtcaaacttcatcatagagtatgcatagggaaactgtatttgtatgtggtgagggtggaagtctcagggccctgcacataactagggactaggacatgtgtggtaattgtcggtgagaaagcactatgaagacagtggtgaggggagtgttgacttacaaacacattaattttctgatacaaattggtgttgctttagacaaactgtctcaaagaagtgacataaggggaaaagggtgtacaaggaaggcctgaagagttagtgatagctcaggatggccggggcaggtggcgcttgctttcatattgccttgaatcaggaaacaaagcgggggcttgctaccagcagcccacttccttcagtgacgcactgccagctgaggaccaagtgtcctacgtagaggggcctatggcagacacttcatgtccaggtcagagcaaaggggagataaggtagggccatagagaagacgtgcctcgggattcagagccaggcctgaagcatgagaggaagtcatccctaagcagggcctgcgttagggttcattaaaggttccagggccagaagaaacttgtcaggtagagatgcaaacggagcctaagtgtagagcagggaggaacaagtgagacaggagagagtggggaaccccatggataacacaataccctgcaggctgcagagaagcctggattttatcccaggatggggaaagacctctgaaggtttgtagcatggattggccagatctctctgtatttgtactctaatcaaagatcaggtgtgtgagcagtttcacccatagtcaattggctggtcacagtcagtttagttctctacctgtttgctagcatttgatgaacccctactatgtgcaacatacttcacttgctaggttgtgctgaccccctactctgtactaagtgatgtacttgctgggttctgtgagacacagtcacagaacccctactgtgcattcagtgatgcacttgatggtgtgtgtgtgtgtgtgtgtgatatttcatcccctctaccaactttcaggaagaatcagcatgaactatgatttcatgtcttgtgttgaatccacggggaaggttggggaccaatggcagcagattcagagctaagcagcagttggtactctgtccattttaggataacctgtccttaccacaagttaaatgtgcattcttgctcagaagccagaatgtgcaaccgtccctcactgtaaccttcccaggggtggcattcgagtgagaaagaaaggccatcctctgctctgcccgcctgctctttaagttcacaggaaagccgtatttgcccttttaaaagccaactatcttaagagacagctcggccctgtgctggggcatttcggagaacaggagtccatcctaaggaacagtattcacattgaaagtgttttcagcatttgggactcttgagtgctggtggaatttgctgaaataaggacacggcactccgagggcttaggaggcaggctctgagcctgtttgccaggtttctcaagccagcaggtgtctgggcaagcttgatcctgagatgaacccggggcaggcaggccatcctaaacactgctctgttccaacggggggaaaagaacccatgggcctgttcccctttcatctttgcaaacaagcaacgctaaatgtttagctgagcccattgcaccattcgaatctgacaatacctgttcttaccgtctgtgcacgcaactgcaagtctggagacctgttgtttagccacacaccataatgggtgagattgccccagccagccacccctatgtggagtgagttcggtagctcacgatgtcactcctgagtttcaggtaagaaagcgaacttccctcgtcacacactgtgtgatcttaagtctggtagttttcagtgtgttgcagcctgacatgcaaagctcatccaggctcctgctaggccccgttttgaagacaaaatcaaaggggtgctcctcttcctagacgcagccctgcgctataaagggcttctgttttgtaatctgtttttgagatctggtgcttgtgtttctaacaccccatcacgtgtggtctgacgtagacctcaccatgactgtgagcaaatgtactgcgaggatgtgtgtgggatggcggagccagctccctgcagcaaaccgtcctttgtcagaaaatttccacagggcctcgcaaccccacacagtggatccttcttccttaggcctgcgctagccggatatggaatgtgagtttgacttttgcaggattccaggtcagtaccctcatacagagcattctttttttagttagggttgatttctaagtttctttttatagaacacgacttgcagtaggggggggggggagagttgtttgtcggttcaactctattattttatttacgtcaggaactgatctgcctgagcactggctggaaggcttggtcttctctgatgggaggatttagtaagctggggtccagaccggctctggagagcagccttcccctggaaagagctctttcctctcctctgtcatgtcctagagacttaccgataaaacgcaacagacttcaggagttggggagatggcccacaggattaaacacttattttgcaagctcgaggacctgagtttggatccgcaacatgcatgcaatgcagggcctgtaactgtagggcttgggggacaaacgggaatatcgagagctcactggctatctgaccggtaaccttcatgctcagtgagagaccctggctcttaaaaacaaaaaaccaaaagaaacaaaacaaaaccgaaaaaaaaaaaaaaccaaacaaacaaacaaaaaaaacccaaggtgacttcatatgtacagacagacacccatggacatgcacatgtgcacacatgcacacacaggcacaccaaatgccagattttaataagaagccctatacagaggtatatggtaaatcatatagtttatatgagaattctagttctgaccatttttacctctttatattttagtagaattgtttcaactggttagagggaaagaagcgttaatgaagctggcagtattgggaagtggagggtgcatcgtcaccaagacgcgccgcctccttgtttcatactcagtctgggagaaaaggcctaagaacagcatcttgctaacctcgcctgcacatcctcaccttaggacggtgagggcctggcgtgtaaataaatgggtggacagaatcatctgagcaggaagactgttgtgaccaaagtagtccttgagacttagaaaacaagacgcaagcaaatagtaaactgtatagagtaagatggcagccatgccaattaaagaacggtttttactgggaatagtcgggagcgggctctgtgtggtccctccccctgacctttcacccccagctgcttagccagactcaaattcaaagagagcaatcaaggtgggcaacagctcacatctgtgtagcagtgcacatgtctccctctcccggtctcccccactgtctgccggcatatctgctttacggcttactttcagtcattttgtatttggttcttttagggcatacatgtgattttttttttctttagtaaaataatttcttggaggcagaaattatttcaaggtattataagtgttcccctgaagattagcacagtaaattgaaaaaatcctctttttatttatgtgtatgcgtgttttatctgcatgtttgtctgtgtgccacttgcatgcccagtgcccacaaaggcgagaaaaaggtgccagctcctctggacctagagttatggatggtttcgtgtggctatttatagacacacggaatctggatcatcttcccctctctccatcttccttcctcccctcctccctcctctcccctgtctcccaaactcctagatccgcctccccctcctgcgtccaatcacaggcttcttgttgtattaatgtttaaattaattggacagggaaaattctgctgcagttgggaactgtcttacttatcattgaagatccaaagcggctttgttcatctgaggtctgccatcatttagcatattcaaaaatccacgtgagtatctaaatactcatgcaaaatgactaaacaataaagaaacatttcatttaaaatgatgattgtgtggggaaaaaaaaaaaaacaaaccccagtgaggagtgtgatattatattttgtcaaatgtcgtcaattttggcttaatagaaagacaacttgattttacatctattcctgcatccggttgtaatacagtatgttatattggttgaggtatagaaagaaattcatcttgcataaaaagagctgaaaaagacttttttttaaatagcctttctggttaactgtggatgttcttaaatattacacccaaatttaacatcatgatttcttacaagttggttgcaatagtgtttctgaaccttttttacatttaagtctcctagtatcttttgcaccttttaacacatgcattatcttggttttaagatttatttatttatttattttatgtatgtgggcacacttctcttcaaacacaccagaagagggcatcagtcccattacagcaactaccatgtggttgctgggaattgaactcagtacctctggaagaagtcagtgctcttaacccctgagccatctctccagcactcagtatacactctttaagtgttttacaaataccactttgttttatcacacagaatgcttacacacacacacacacacacacatcttaagaataaaagttaataaaatgattagtttttacttcttcccctgggtacgcctggcacggtgcctgccagcacctccctgtcatcccttgccccagactacacttttcagtataaaactctacatcatcacaaagtagttttgatctcacaaatctggaaaatgtcttaggaaacccagaggcccttgaaacgtgcttttaaaacagctaggcttaaaggaatacagatgggcaagaactaatttctattttcttcttaattttgctcccagtacagtagaattgggctctttggtctggtttttaaggttctcccgcaggaggttctgtttgcacagtctgtatattaagatatttgctcaaactgctctctgctcatcatcaacatggccagcacacctcatgctatagctacagagagtacaaagccgggcaaaattgttcctgctctttggggagtcatcaagaaagatacatgtgaacaaacatatctgtctcaggcgctctgaacctctcagctgctctccaaggagacctctgggctggaggaggagcagagcttgaagagaaaggaagcaagatggacacaggaagtggaggtcttccagagcttgtgacagaggtggtccatgaaggggagagaatgccgattggacatctgggtgtgagacaggaaggccaagatggagtcgagactgctgcccctggctgtttgaatctaatgaacagactttgttttgttttcttatgaggtagacaattctggagctgtgactctgggtcactcagttaagtttgctccacaagacccattgcccatgagagaaagctgggcacgtttgcagtcccagcactgagggtagactcaggcatagctctggaacctgcatcaccttaacaatgagtcctaagtcccaaagggagaccttgtctcagaacacaagtagatggctctttagattgacctctgacctccacacaggcatgtacacacatgccctgaaccccccagtatgtgcatctgtacacacacacacgtaaacacacatgcacacggtagttaattttgagtgaaagtatagcagaataatttcattacttgtatttacttatttgttagatttatctatttttaaacaggttctccagtgtagcctagtctgaccttgaacttacagtcttcttgcctcggcctcctaagtgctaggattacaagtttacacgtgtgtagcaaggcacctggccttgcaaagtcatgttagtcatgggaagtatcacacttaggtgcccatgcttatactgcatgtatgtgtatttgttctatatacctgtagtatggcaggagacaagccagcagaagagtccacatatgctgattaactagaatttccctgtgaaatactcaaataagatatattttatgttaacacacacaaaatgtttatattgaagtttatagaaccatatactctgttttcatattgaggtatgtaaatatggggtgaccgtttatcttttggggatcgagtcctagtgcatgctatttccctggcatagttattaattacacttctttctttctctagtgccttgttttgggtgctgaataattcaccctatttctagatctgtacttataaaatagaattgtaatatatgcatattttcatttgtttatatacattcatgcatgtatacatgcatgtatatatatatttgaatatatattatatatgctatatatatttaaaaggtgattttttttgttgttttcttggggttttttgttttttttttttttggttttttgagacagggtttctctgtatagccctggctgtcctggaactcactttgtagaccaggctgacctcgaactcagaaattcgcctgcctctgcctcccgagtgctgggattaaaggcgtgtgccaccacgcccggctttttcttttttcttttcttttctttttttttttttttttttttttggcttttcaagacaggctttttccatgtagccctagctgtcctagaacttgctgtataaaccaggctggcctccaacttacagagatcctgcctttgtctctagagcactgggattaaaggtgtgcaccaccactgcccaataaaaggtgcttttaaaagttattctggacaaaatacaaacttggggctgatacaatggctcaaaagatatcaaggcacttgtcaggcaaggctgacaacctgagttcaatccctgggacccacacaagagtgaagagaagaaataactccactaaagtgtcccctgccctccatgtgtgctccttcacgcagccatcaccacacatacacacatacacacacacacacacacacacacacacacacacacatacacacgataatagtcagtaaagttaaacagcacagagagtggtgacagttctctagttacatattgttttaatttttattagcgttttaaaatattttttattttatgtgtatggatgctttgcctacatatatgtctgtctaccacatgtgtgtctagtgcccagagaggtcaaaagtgggcatcatattccccagaactggagttaaggacagttgtgctctgccgtgtgggtgctgggaatcaaacatgggttctctctggaagagcaaccatagtgctcataactgccgagccagccctgccccacccccaatctcttcatgtttctctatctcagtaacactgctgagaacgacaaacttgttgcgtgaaactccttttagaaaacattttagcgattacacgtaaatcaaatcttaccttctctctgacttacactctttgttacaaaatctactgtgggtcctctgtgcagagactcccccgtggtttcagttactctctgggagaactctggaggatttgctgccaggtgcttgagtctgtaatgtcagagagtacagatgttggtgtgaatggcccttcctccccttcagagctgccctaagtcccctcttgcctacatcctgctttctttgctgctattgtgacaaaccattctctctatggtagactgacaaggtcattcagccgccgccacccacgcagaggtataagaacaggtggtcagccctaattgtcagcctgattggattgagaggtctgtaggaaatttgtaacacatggctctggatgcattggaagggattagagggaaagatgtgcctgaatgtgggcagcgtcagactgggagtttaactagagtaaaggccttgggagaagcaagctagctagcccaggctcctcctgcccctcactctccttccccctctcctccctctctttccccctcctcctacctccatctgtcagttgcaatgaactgacttttctacagtcaactaaaccctttgaacaattgtttcttgcacatttcacaacagtgacaagtctaaagagggtaacatttttagaccatccaagagccactgggcctttcagtgttctaactttggaagctatgatgaaactgaattattatagacttagaaacatacttccctggcctactgtcttgtcatctcttggtttgcctttagtactccacagggttcgttttaaaagctctagtctagtctggttataataaaaggagaatcaaagagtaggctggttctccccaggccatgtgtggaaaggaggcagggtgtctctggtggtcagatcagttacagacattgccactcagaagagaagcatctcagaggaacaagttagaatgactccttcctttcttgctgcttctctgagcagatagccctcatgtaaagctaccagtcacttatgggaagcttttaaaagtaaatcaataaattgtttcggctttatgaattatgtttggatcagattatcaaggttatctttgaaaacatatagaagaggctgaggttatgtctcaatagtagagtcttgaaccagcatgtagaggccagggattcagtcctcagcagcacacacatgcgcaatcacacgcacacacatgggcgcacacatatatcaaatgaagccaggtatgttgacaaatgcctttatacctagtactcaggaagcagaggcagactgatctctgtgggctcaatgccagcctaacctacataaactagttccaggccagtagggcttgggatgtgactcacttagcacatgtgatagcctggtcatggagtatcaggggagaacatttgaaagaagacagaggtaggtggatctctgagttcaaggccagctttgtctagataacaagttacaagctagttggagcaaaatagtaagaccttgtgttacagggagaaagtcagacaaaacgtggatgcttctaaaagaccatgatgccggtcagctctagagtctctgtgcagcagcctcaagtggggacaccctttctgcttggagatacagaaacttgccctacccatatttggacacatatacatagccaagcctttgcagaaggcaggggaaggaatcctgggagaatttccaactaagctacttgcaatggcatgagaaacagtctggggcaagaggaaggctggccttctgttgacttccaagatttagggaaaacaacaggatgagataaccggctgagttcttatgtgtttaaaaaaaaaaaagtttccccagaagtagcacatagcctagaaatgaccaaggcacctatgggaggcgccctgaccatttgtttcttgtttcagatgacagtcatgtccctctccagggacctcaaggacgactttcacagtgacacagtactctccatcttaaatgagcagcgcattcggggcatcttatgtgatgtcaccatcatcgtggaagacaccaagtttaaagcccacagcaatgtcctggccgcctcaagtctttatttcaaaaacatcttttggagccatacgatctgcatttccagtcacgtcttggagctggatgatctgaaagccgaagtgtttacagaaatacttaattatatctacagctctaccgttgtggtcaaaagacaggaaactgtcactgatcttgcagctgcagggaaaaagctgggaatatcattcttagaagaccttagtgaccgcaacttctcaaattccccaggtccttacgtagtctgcattactgaaaagggagtggttaaagaagaaaaaaatgagaaaaggcacgaagaaccagctgtcactaatgggccaaggatcacaaacgcgttttccatcattgagacggaaaatagtaataacatgttttctcccctggacttgagagcaagcttcaaaaaggtgtctgattccatgaggacagccagcctttgccaggagagagccagcgtctgccatgaggtagagcctgtccgcacgcttgctgagcactcgtatgccgtctcgtccatcactgaggcctacaggagtcagcctccgagggaacaggacagcagctcatctgctaaaacaggaaaagaaactggtgatgctcttgccacaaaagcgaagccatgccgaaagccaaagccccaaacccaggattctgactcaaccacagaaaatatgccactctctctagtaacctgcccagaggtgaatcaagaaagaagcccacagccagctccagatctgtcacactcagagcctcccagcaatgaaggggatatccattttcccagggaagatgaaaatcagccctctgatgctccgggtccaggagcagcagaggtcccgcccctcgtttataactgcagctgttgttccaagtcctttgacagcagcacgctgctcagtgcccacatgcagctccacaagccgacccaggagccttttgtgtgcaagtactgcaacaagcagttcaccaccctcaacagactggaccggcacgagcagatctgcatgaggtctagccacgtgcccatcccaggaggaaacccaccgttcttggaaaactaccccactattggtcaagatggaacttcattcagaagcccggaatcattagggccagaaaataggattggcgaactatccagcgcggggagtgccttgtcagacgcggaccacatggtgaaatttgtgaacgggcagatgctctacagctgcatcgtgtgcaaacgtagttatgtgactttgtccagcctccggcggcatgcaaatgttcactcgtggagaagaacatacccttgccattactgcaacaaggtctttgcgctggctgagtacaggacgcgacatgaaatctggcacactggggagaggcggtaccagtgcattttctgtcttgaaacttttatgacctactacatactaaaaaaccatcagaagtcctttcatgctatagatcacagactctccatcaataaaaaaacagcgaacggaggcttgaagcctactgtctatccatacaaactttacaggctcttgcctatgagatgcaagagggcaccttataagagctaccggaattcttcctatgtaagtgctcaaggaagcagtcaaaggggtgaatctgcccctgatacgttcatcgttccgaatctgcaaagctctgaaatgcccacactggacttccaagatggcagaaacacgttgcccagcagccctgccgtgccagtggaaacaccttcacggcagggcgcacccacttctgccagagtaaaaaatgcagaaggcatcaaatggaggaagcaggcagtgaaaaccaatctcgtcgataacttcgattcaactgaggtgtcagtttcttccactggaaacaccgtcagcaccaccctacagacagagcccgcatgtgtttcatctgtgggcaaaggcagtgagcactcggcctctgtgatcagctacagcggctcggtgccctccgtcattgtgcacagcagccagttctcgtcggtgatcaagcacagcaacaccatcgctagcctgaccaacagcaaccacaagtccccttcacaaccggtggtcagcccgtccctgatcaaggacagcaagcccgagacagataaagccagtaaatctgcaagcagacccaaaagcattaaggagaaaaagaaaactgctccgagtaacaggggagaaataacagaggaggcaaaatatattgctgatcacggagggtcttcaggcaaaaccacaaacgctgaagaaaccagtaagattgaaacttatatcgcaaaacctgctctgcccggtacctccacaaatagcaatgttgcacccctttgccagataacagtaaaaattgggaacgaagccatcgtgaaaaggcatatccttgggtctaagctgttttacaaaagagggagaaaacctaagtatcaaatgcaggaagagacactgcctcgggagaatgacccagaaacccctggggacagcccccttgggctttgccaggctgaatgtgtagagatgagtgaagcatttgatgaagtgagtgaccaggactccactgataagccgtggcgcccatactacaactacaaacccaagaagaaatccaaacagctgagaaaaatgaggaaagtcaaatggaggaaggaacgcaggagcagaagccccgtcggccggtgcagatacccagccgaactggatcgtgcagaggtgaaactgcccccagataaggccttcgaagaagaagaagaagaagagaataaagagatgcccaagctgcagtgtgagctctgtgatggctgccctgatggggcagcaggggcgggagccgaaggcaagccccaccagcatctcacttcgaagccttacatctgcgagctctgtgcaaagcagttccagagctcctccacactcaagatgcacatgagatgccacactggagaaaagccgtatcagtgcaagacctgtgggcggtgcttctcggtgcaggggaacctacagaagcacgagcgcatacacctgggcgtgaaggagttcatctgtcagtattgtaacaaggcattcacactcaacgagacgctcaagatccacgagagaatccacactggggagaagcgctaccactgtcagttctgctttcagggtttcttgtacctctccaccaaacggaaccacgagcggaggcacatccgggagcatgatgggaaaggctttgcttgcttccagtgccccaaaatatgcaaaacagctgctgccctcagaatgcaccaaaagaaacacttatacaagaccttacctaagcaagaggaaacaggcgacacgtgccacgagaacgcggatctcttggaaagtcagctttgcactgattccgaagacagcgaacaaaaggatgacataaaagcctttgctgaaaacgtcctttgagtgacaacaacagttagaaatcttcaaaattgtttgtgatttttctttctttctttctttctttttttttttttttttttttagttttttaagcttagttttgttcacataatagtcacaaaggatagggggggcagtgttaattttcatttgtgtaaactccaaaaaaaaaaggatcctaacaactattttgggttttatcattcacttcacacagaatgagtaaaaaacaaaatagctgaatcctctaacgaccctagtatcttgtgaaggctaatgaagttcttagctgtgggattttgaacagtgaaaacagcaacggaattttagcctaatttaaccctttctcacgagcactaatgaggtctgctgaactgttgttagtcactggagagagcaagggtcaggatcatgaagacagcgtctttgagacgtgctaacgagctatgacaggatttattgccattgagtttctgcactgttaatctttggtaaattaatgggtatttacaaaatacttaacaatataactgaaaatatgtaatggataacctaaagtaggacattcacatatcatctagaaatacttttctgcaacataaaccttgtaaaatacatatatgaatcactataacttttagctgtctatatgtcccttgtagagaatcctaacgagcaatagacctcagagaatgaggactgctgtagaaatcagtagagcacttggaatctgactggcgagcatgtgtatgctgctcaatggaatgctgtgctgttcccttgaagtacagctgagctgttattagaactggtccactcaagtcacacagaacataggtcatgccttatctatggggaaagccttcccagacttacctaagcttacctaggccatataatcctctgcagtggcctcacctcagagaatgaagaatggtcaaattcttcagaactctctgcagtcttccaaggccatggatgttgggggctaccctacccagacttaaggggtcagataatcctgatatctcccattccgctgaatcagcacgcaggaggttgagagcaagacacacctctgtggtaatcaagtctcaggcacttggaaatggcagaaagcctaattcatcaatcttacacatccttggagataatgcagcccacaggtacatagtggttaacaacaggctcttgtcccccactgataacatggggacaaggggacctggtgacctcctttgcctctaacagcagcactgtttctgagggttggggagatagaatatggaaggacagggctctgtcccttacagacaggactcagaagcatccacaaagtcagatgctctgtcctcatgtgtgcagacattagccccacttacatttctaaataatttttatattaacatgactgtcaacattgccttcagaagtctgcttgccctacaagtatttttttttcctgtgaactaagatcctggaaagctggaactcaaaagattcttactgttaaaacttccagaataggagggagggagagcacaccctgcccttccagccccaggatgggcaaaactcagaacagttcaagcagccattcctgttcaatgggtttagtagatggaaagccaaggctggaaggttatcagaggactcctgtttctcgcaccaaatgttgtgttgtctccatgaagaaggcttagtgtggtttggggtaggcaaaaaaaaaataataataataaaataaataaaaaaatatttaaacacccagaacaaacaaggacatgattcaaggtgaccttgtatactgtagcactttgctgttaaccccagtatgtatctgcatttatcatttgctcatctacgtccacctacatacagtattatatactagaggagatggggaactgcaagcaaactgagctttgttttgtccgttgtatatatgtacacccacatcatttgagttttgttgagagagtcacaaagggcttatgaaaatcacttttgaattaataactagatgacaagcaatcctgtgatccactaatttgttttatctcagttataattataaaaaattataggtttaagttgttttgatttaactacaaaaataattatatgtatggatgtctcctggcccttatatgtggatattttttaagtggacttgtatgctgataattctagaccaaagtaaatatggcagaatatttatacatacaaataattttgcaaatattttctataattgtattattcgtttaaaatgttgatagcttgtgttagtttcagggaggggtgtatattttgataaaatacttgactttgtatttctgtacattctatacaatttatagaagagccattttaagacaactggtgacgtttttgttgttgttgattgtataaatgttatgactggtgtttaagtttgcatcgagtacgtaaagaccaagtagaactgaagtgtaaacagtggacatactgtatgccgtacgagatatactgtaactcactgtcttcgcatctgtattttggttaggaaatatgattaaatgcagatgttaagggttggaaaggtctaattttatttttagagataatgaatataaatttgttttgcttgattaaaatagcttattcctacattaagtgtcttttctaagtgacttactgttaattcttctgtgtagctatttcatctttatgagtcatggctttgttacatacaacactcattcaccataactgtttccttgcgtgtatttcatggaacctacatgcttaggactcataaactgtgatattaaaatagggaccagacatagtggcagattcatttaatcccagcactcaggaggtagaggcaggcagaactgagtttaaagccagctggtctacataatgaattctaggccagccagagctaccaaacaaaccaatccgagggggaaaggggaaaacctgaataagagacatgaaatacttccggtaagtgttggggataagcctgatgttatggtacctcaaagtgaaatcctcacttggaagtattacagaaaacaaatatttactgacttcccagatgcttagccatgtatttggatctaggcattcattattaacccccagctctgaagaaatccccattacctattttgtagtgacttcgagacagtctcacagcaaggcagggagtttgaactttcttgactctttcaagaaaaatgcttataagacactggagagtgaggggacaagacaaagtcgtgcagctttgaaatgttctagatcagtggttctcagccttcctaatgctgcgaccctttaatgacccctaaccataaaattactttcattactacttcatgactataattttgctactcctatgcattgcattgtaaatatctgtgttttctgatggacttaggtgacccctgggaaagggtccttcgactctcaaagagttcaccgcctgcaggttgagaaccaccattttgtagacttctgtgaaatgggcttgaaggaggctgtttccagattggtgtcatgtgaattgagcgctgagttcctcttctgggccagggatattgtcccataaaacctactatagcttcatgctgttatcagctggcaatatttcacatgaaaggaatcccattgccacagactaactgacttagttagggttttactgctgtgaacagacaccatggccaagacaagtcttatagaaaaacaacatttatttggggctggcttacaggttcagaggttcagtccattctcatcaaggtgggagcattgggcagcatctacgcaggcatggtgcaggcagagctgagagttctacatcttcatctaaaggctgctagtggaagactgccttccaggcaactaaagtgcccacacccacagtgacacacctactccaacaaatggtgccactccctgctccaagaatatacaaaccatcacactaaccttagccagttatccggtggcaaatgcaggcaatcatgaagggaaatgtgaagagggttctaagctcggcaaatacaatccaccaacacaaagtcaatttttatttttacactttcaagtggctacttgtagcatccgttttctatttgtagggcaaacaacccagatttaccccaaaactgatcaccattatcgctgctttttaaaaatgtgttatctagttgtacaacattttaaacagtgaagcatcctgtagccaggcgtggtggcacatacctttgattcttgcccagagggagaggcaggtagatctctgtgagtttgattgagaccaacctgatctacatagtgagttccaggacagccagggttattcagagagaccctgtctcaaaaagtaagagctggtgaggattagaaaagtacccacattaaaaccggtcaggtgaggcaaccccattgctacatagttttaaacatattttagtcaacacctggttggtgtagcttctttatgaccttcaccctctaaggtggcaaggatgtctccacttaagacttttgtctctatctaagaactttttaccctctctcactaaactctggccatctactgactttaccttctggtaggaattctttttccctccctggtttacatcctttgaccctgattgttcatcactgcattatggtcactgagcatgatgttggtatgcagtaatctctccaactatagacaatggatgaaaagcctagccataattgaattgctatatttattaattagcagtagcaaagatgtcaattcctttaaatgttttttgtatgccaaggagatggcttagtaaaagcacctgcagtcaagtctaaccactggacttgatccccaggacccacattgtggaaggtgaggacagaagggtgccctctgacctcctcaggagctgtgatggaacataaacacacacacagagacacgcacagacacagagagatacacacacaccacatacacatacacacacacagtggtggtctttgctactttgtagtttcttctttttcccacacttcttagtattgtgcattgtatcaaggcttgggccacagatacatgaggcagcgtgtatgtatgttccaggtacttaagtctcatgaaggaggctgatgaagcaacagagaattaggaactagagccagccgggtgtggtggcgcacgcctttaatcccagcacttgggaggcagaggcaggcggatctctgagttcgaggccagcctggtctacagagtgagttctaggacaaccaggactatacagagaaaccctgtcttgaaccaaaaaaacaaaaaaaacaaaaaacaaacaaacaaacaaaaaaacaactagagccagagttcccaagggttcaaaaccagagaagaaagaagacagagcccctacttcaagctcaggtccatactggtatgatagggacaaaggaaccataggtggatataaacgcctgtgtttgggtgagcctggacaggcagtcaaaggacaccttaacacagccctgaagttctcttctgacacatggggctgcctgcgagggactgggtggtagggggatgtggtcagaaaggtgccaagaattcattccaaagtaagaccccttagtagggtttgcacagaaggggatctggtacagatctggtacatttgaggatcacttcttcctgcagcatcatgagcagaccactagacagggaaggttggagacaggagagcagatgagagattgtgagtggatgggtgggaggtggtggtgacaggatagaaacagtaagggcatgttgcattctggacatatgtttttagatcttttgatgtggacgttttcaaatgtgcagctcccatagacccataatcccatgccagtgactcaacaccaatcacggtttagctgtgccctgtcctgctctccctctccatgtcatatgtactaatgcctctatgctcattctaaaaagtaaagtaagcagggggctggagagatggctcagtggtttagagcactggctgctctttcataggagctgggttcgattcccagcacccacatggtggctcataaccatctgtaactacagatctaggggttctgatgtcctcttctggccctctcaggcactaggaatgtgcgtggtgtatgtatacatacatacatacatgcaggcaaaatactcatatacttaagataattaagtctaaaaaatatgttttaaaattaatagttaccagcttggaagactgttgtcaataaagtgcttgccactcaagcctgacaacttgactttggcttctcagcaccagtgtaaaaagctgcatgtccctgtggttcaagatgtagaactctgggctcctccagcaccatgtctgcctgcgcactaccatgcttcccatcgtgatgataattgactaaacctctgaaactccccaaagtaaaagtttttcttcataagagttgccatggtcatgttgtctttccgtagcaaagaaccctaagacatcccctcacttgatccctcctgttctcacccctgcccctcccacactggtttcctccccgactccacccatgatgtctatcctacttcccctcctcagtgagattcgtgcatccccaccttgagccctcctgctgacttagctactttgggtctatgggttttaccatggttatcctttacttttaaagctaacatccacttataagtgagtatataccatgtttgtcttcctgggtctgggttacctcactcagggtgatctattttagtttcatccatttgcctgcaaagtccatgatgtcattgtttttaatagctgagtaatattccagtatgtaaatgaccacattatccattcttaagttgagggacatctaggttgtttccagttcctggctattatgaataaagctgctatgaatatttcttttaaaaaagctgcatgccttttgttctacttctagggagacagagacagatgggatccccacaactcactagccagcccgcccagccagtgagctccagactcagcaagggagcttgactcaaaggctaaagtggagcaccataaagatacctgataacaacctctgcctctgtgtgggagttcatgtgcatgcatgcacgcgcacccacacacaccacatatcacatcaaaaaaaaatgttacttcatgttaaatttcatcagctcgaatttttttttattatcttggactatcgagattgccatgaccgtctcggctttggacttgacctgcctggggtactggggaatgatgaaggcaggcacacatgcagagaagctgggactgagcagctgatgcatcggcagcagctgggaaactcaaatgagtttattaaacacaacacacacgaggaggtaggttaggaggaggtgggttagctcatctcagtggggttctctgtgtgacctgaaggcatctgagagaagaaaagctgtggctggggctggtgagatggctcagtgggtaagagcacccgactgctcttccaaaggtccggagttcaaatcccagcaaccacatggtggctcacaaccatccgaaacaagatctgatgccctgatctgtgtctgaagacagctacagtgtacttacatataataaataaataaataaatctaaaaaaaaaaaaaaagaagaagaaaagctgtggctgatactgcacacaggaccaccatctgcacatggacccagggaaggccttgccatgagtcttaggctcatgggtgtccccatgtcaactatccatgtttcccccaggcttcctctgctcactcagagagatagatggtttagtggctaacagagcatacagctcttaaggaggatcaaaatgtgattcccagcacccatgtcaggtagctcagaacaacctgtaactccagctacacgggacccaaagccctagcctctgcaggagcctgcactcgtgtgaacagagcctctcttgccgtcacttcacacacacacatgactataaaagatacacataaatcttaagatatcctattttcataattgctattatttaataatttgaatgagaatctagtgaggtctgcggcatcatttcctgatcagtagacgccattcctcccccttttaaatttagccataaggaaatgaggtgttcacaatgtaggaattgccaagaagtcttcctcagtggaaccctcttcttccgttaggaagcacacaacgctgaagacgttgagtggactttgaagatagctttaatagttgttggtggtgttggttaggtgccaggacataagaaaaacgaagcaaggctaacgctttaagttttcaaacttgagcagttggaagaatggggctgcctacagaccgctagctacatgctcagagattcaaatgagactggcaccaagtccctgaagcacagctgagttaggtcctgagaatccaggagaagcagaaagcggtttgcatgatccggagagaaacacaccagaaaatgagtaattgcaaccactgtaaagtgctgtgaagaagaggcgcttactgcctggtgctagcaggccatgccctagtccagtcattctcaacctatgggtcgtgacctctttgggggtcacgtatcagatacccggtgtatcagatatttacattactattcataatactcgtgaaattatagttagaaaggagcagtggaatcaccacagcatggggtctgtattaaagggtcacagacttaggaaggttgaaagccactgccctagtttaaaccttaagaaaaactggccttgaagaagtgacatgtgagctgagtaacaggtagcaaggagaggagttctgggccctggaatggtgtgtgctgaggtccgcctctggagagatcgccttgcatgggaggccggtcctgaccagaatgcaggtgagccaggcttgagatcaatagggatgacaaagggctgagatatgcagggcctttgtgctgtagatctgggtcttgtatgaagagcaacccagaggcacttaggttagagacgtggctcagtgcttgcctggcatgtgtgagcccctgggttcaatccaaaggatggaaagaagaagaaaaaagaagggagagagaaagggagaaatagaggaaagagaagccccctgagttcaagccccagcatggtctacatattaagtttcgagccagccagatagaaaaaccctgtttcaaaaaaaaaagcaagccacattggctgaatgtagaaaatgccttggtggacggtgatggctagaaacagctgttaggaagtgactgagctaaaggtgatagtgacttagattgtatgtctgcagtggcaatggggaagaaggagaaaagctgagagagacttagaaggtagaatcagtgggacttggtgttgggttggatttgagacgctagggttaaggaaggaccagggatcatcttttggttttagaatgattcataccggaaatgaaagatgtctcccatgaagcttatataagaaagaagccagagttccagagatgaaagatgagtcaaagaaatgcacccaccccccccccaaaagggtgacatgtggagaaggccagagcttagatgggagccagaatcttcaggacaaaccagtgtctgcagcgatcaggttcgttcagtgccctctgctgtagaatagcaaaagcccaaagtctgggcaatcagctacacaccctggtccccctaatggtagggcaaggaaatggcatgtcagccatagaaggttactcacgtcacaggagcagccaggcactgccagagaggagctgacacatctctgagatggctgctttctctcctacagtcaaccaacctgagaccacgtacaagaggcaaatagaacatatttaattaagacctttagccctgcttacagctttcaaatacccagacacataatata

SEQ ID NO: 2375 - DNA, 4296 bp, Mus musculus
cctgccggcaccttagggttttgaaaagaaaaatctacaaatgctattttctttatcagaatccgtcttcacttggcagtagcttaatagttgaaccaagactctgaggctgaaatgcaatgtcacttacaacattaatcagatcccgcatttaaggtaggaggaaaggtggactatttttaactcccagccattgcatccggtgcaagcaactccggctctcacgtttgtgtttgcagagcccgtgtcagtggtttgattttcagcaaatgtgacagtggcctttgcagtggtcagctctgagctttgaactctcagaggagcaaaggagaaaaaaaaattcaacacagcacctccttggttgcagcctcagagaatccttggataagaaacttctttttttcagtcctgttttgctgttgataaattcagtcctcgtgatcacggggctctcaagctgctcggcgtatgatttttggtgtgtgtgacaatcgcatctaaaacttgtgagcaagaagacggagaaatcagttggtctccatcgccttacataaaaatggccgagcgtcttgttatgctaacactgccctgagtgatacgcacagatcttgatatggaagacatggcgggctcagaaccaaggatttccgagtgatttctgccaaagcacagaagctaactccgtcaaggctggcgtgttctgagatgacagtcatgtccctctccagggacctcaaggacgactttcacagtgacacagtactctccatcttaaatgagcagcgcattcggggcatcttatgtgatgtcaccatcatcgtggaagacaccaagtttaaagcccacagcaatgtcctggccgcctcaagtctttatttcaaaaacatcttttggagccatacgatctgcatttccagtcacgtcttggagctggatgatctgaaagccgaagtgtttacagaaatacttaattatatctacagctctaccgttgtggtcaaaagacaggaaactgtcactgatcttgcagctgcagggaaaaagctgggaatatcattcttagaagaccttagtgaccgcaacttctcaaattccccaggtccttacgtagtctgcattactgaaaagggagtggttaaagaagaaaaaaatgagaaaaggcacgaagaaccagctgtcactaatgggccaaggatcacaaacgcgttttccatcattgagacggaaaatagtaataacatgttttctcccctggacttgagagcaagcttcaaaaaggtgtctgattccatgaggacagccagcctttgccaggagagagccagcgtctgccatgaggtagagcctgtccgcacgcttgctgagcactcgtatgccgtctcgtccatcactgaggcctacaggagtcagcctccgagggaacaggacagcagctcatctgctaaaacaggaaaagaaactggtgatgctcttgccacaaaagcgaagccatgccgaaagccaaagccccaaacccaggattctgactcaaccacagaaaatatgccactctctctagtaacctgcccagaggtgaatcaagaaagaagcccacagccagctccagatctgtcacactcagagcctcccagcaatgaaggggatatccattttcccagggaagatgaaaatcagccctctgatgctccgggtccaggagcagcagaggtcccgcccctcgtttataactgcagctgttgttccaagtcctttgacagcagcacgctgctcagtgcccacatgcagctccacaagccgacccaggagccttttgtgtgcaagtactgcaacaagcagttcaccaccctcaacagactggaccggcacgagcagatctgcatgaggtctagccacgtgcccatcccaggaggaaacccaccgttcttggaaaactaccccactattggtcaagatggaacttcattcagaagcccggaatcattagggccagaaaataggattggcgaactatccagcgcggggagtgccttgtcagacgcggaccacatggtgaaatttgtgaacgggcagatgctctacagctgcatcgtgtgcaaacgtagttatgtgactttgtccagcctccggcggcatgcaaatgttcactcgtggagaagaacatacccttgccattactgcaacaaggtctttgcgctggctgagtacaggacgcgacatgaaatctggcacactggggagaggcggtaccagtgcattttctgtcttgaaacttttatgacctactacatactaaaaaaccatcagaagtcctttcatgctatagatcacagactctccatcaataaaaaaacagcgaacggaggcttgaagcctactgtctatccatacaaactttacaggctcttgcctatgagatgcaagagggcaccttataagagctaccggaattcttcctatgtaagtgctcaaggaagcagtcaaaggggtgaatctgcccctgatacgttcatcgttccgaatctgcaaagctctgaaatgcccacactggacttccaagatggcagaaacacgttgcccagcagccctgccgtgccagtggaaacaccttcacggcagggcgcacccacttctgccagagtaaaaaatgcagaaggcatcaaatggaggaagcaggcagtgaaaaccaatctcgtcgataacttcgattcaactgaggtgtcagtttcttccactggaaacaccgtcagcaccaccctacagacagagcccgcatgtgtttcatctgtgggcaaaggcagtgagcactcggcctctgtgatcagctacagcggctcggtgccctccgtcattgtgcacagcagccagttctcgtcggtgatcaagcacagcaacaccatcgctagcctgaccaacagcaaccacaagtccccttcacaaccggtggtcagcccgtccctgatcaaggacagcaagcccgagacagataaagccagtaaatctgcaagcagacccaaaagcattaaggagaaaaagaaaactgctccgagtaacaggggagaaataacagaggaggcaaaatatattgctgatcacggagggtcttcaggcaaaaccacaaacgctgaagaaaccagtaagattgaaacttatatcgcaaaacctgctctgcccggtacctccacaaatagcaatgttgcacccctttgccagataacagtaaaaattgggaacgaagccatcgtgaaaaggcatatccttgggtctaagctgttttacaaaagagggagaaaacctaagtatcaaatgcaggaagagacactgcctcgggagaatgacccagaaacccctggggacagcccccttgggctttgccaggctgaatgtgtagagatgagtgaagcatttgatgaagtgagtgaccaggactccactgataagccgtggcgcccatactacaactacaaacccaagaagaaatccaaacagctgagaaaaatgaggaaagtcaaatggaggaaggaacgcaggagcagaagccccgtcggccggtgcagatacccagccgaactggatcgtgcagaggtgaaactgcccccagataaggccttcgaagaagaagaagaagaagagaataaagagatgcccaagctgcagtgtgagctctgtgatggctgccctgatggggcagcaggggcgggagccgaaggcaagccccaccagcatctcacttcgaagccttacatctgcgagctctgtgcaaagcagttccagagctcctccacactcaagatgcacatgagatgccacactggagaaaagccgtatcagtgcaagacctgtgggcggtgcttctcggtgcaggggaacctacagaagcacgagcgcatacacctgggcgtgaaggagttcatctgtcagtattgtaacaaggcattcacactcaacgagacgctcaagatccacgagagaatccacactggggagaagcgctaccactgtcagttctgctttcagggtttcttgtacctctccaccaaacggaaccacgagcggaggcacatccgggagcatgatgggaaaggctttgcttgcttccagtgccccaaaatatgcaaaacagctgctgccctcagaatgcaccaaaagaaacacttatacaagaccttacctaagcaagaggaaacaggcgacacgtgccacgagaacgcggatctcttggaaagtcagctttgcactgattccgaagacagcgaacaaaaggatgacataaaagcctttgctgaaaacgtcctttga

SEQ ID NO: 2376 - protein, 1190 aa, Mus musculus
MTVMSLSRDLKDDFHSDTVLSILNEQRIRGILCDVTIIVEDTKFKAHSNVLAASSLYFKNIFWSHTICISSHVLELDDLKAEVFTEILNYIYSSTVVVKRQETVTDLAAAGKKLGISFLEDLSDRNFSNSPGPYVVCITEKGVVKEEKNEKRHEEPAVTNGPRITNAFSIIETENSNNMFSPLDLRASFKKVSDSMRTASLCQERASVCHEVEPVRTLAEHSYAVSSITEAYRSQPPREQDSSSSAKTGKETGDATKAKPCRKPKPQTQDSDSTTENMPLSLVTCPEVNQERSPQPAPDLSHSEPPSNEGDIHFPREDENQPSDAPGPGAAEVPPLVYNCSCCSKSFDSSTLLSAHMQLHKPTQEPFVCKYCNKQFTTLNRLDRHEQICMRSSHVPIPGGNPPFLENYPTIGQDGTSFRSPESLGPENRIGELSSAGSALSDADHMVKFVNGQMKCIVCKRSYVTLSSLRRHANVHSWRRTYPCHYCNKVFAEYRTRHEIWHTGERRYQCIFCLETFMTYYILKNHQKSFHAIDHRLSINKKTANGGLKPTVYPYKLYRLLPMRCKRAPYKSYRNSSYVSAQGSSQRGESAPDTFIVPNLQSSEMPTLDFQDGRNTLPSSPAVPVETPSRQGAPTSARVKNAEGIKWRKQAVKTNLVDNFDSTEVSVSSTGNTVSTTLQTEPACVSSVGKGSEHSASVISYSGSVPSVIVHSSQFSSVIKHSNTIASLTNSNHKSPSQPVVSPSLIKDSKPETDKASKSASRPKSIKEKKKTAPSNRGEITEEAKYIADHGGSSGKTTNAEETSKIETYIAKPALPGTSTNSNVAPLCQITVKIGNEAIVKRHILGSKLFYKRGRKPKYQMQEETLPRENDPETPGDSPLGLCQAECVEMSEAFDEVSDQDSTDKPWRPYYNYKPKKKSKQLRKMRKVKWRKERRSRSPVGRCRYPAELDRAEVKLPPDKAFEEEEEEENKEMPKLQCELCDGCPDGAAGAGAEGKPHQHLTSKPYICELCAKQFQSSSTLKMHMRCHTGEKPYQCKTCGRCFSVQGNLQKHERIHLGVKEFICQYCNKAFTLNETLKIHERIHTGEKRYHCQFCFQGFLYLSTKRNHERRHIREHDGKGFACFQCPKICKTAAALRMHQKKHLYKTLPKQEETGDTCHENADLLESQLCTDSEDSEQKDDIKAFAENVL

SEQ ID NO: 2377 - DNA, 3775 bp, Mus musculus
agccttggcctcctgctcctgcttgctgcagccgtctgtccgttgggacaattcaacagtcagcctttagacacctctttgcagatcttgatatggaagacatggcgggctcagaaccaaggatttccgagtgatttctgccaaagcacagaagctaactccgtcaaggctggcgtgttctgagatgacagtcatgtccctctccagggacctcaaggacgactttcacagtgacacagtactctccatcttaaatgagcagcgcattcggggcatcttatgtgatgtcaccatcatcgtggaagacaccaagtttaaagcccacagcaatgtcctggccgcctcaagtctttatttcaaaaacatcttttggagccatacgatctgcatttccagtcacgtcttggagctggatgatctgaaagccgaagtgtttacagaaatacttaattatatctacagctctaccgttgtggtcaaaagacaggaaactgtcactgatcttgcagctgcagggaaaaagctgggaatatcattcttagaagaccttagtgaccgcaacttctcaaattccccaggtccttacgtagtctgcattactgaaaagggagtggttaaagaagaaaaaaatgagaaaaggcacgaagaaccagctgtcactaatgggccaaggatcacaaacgcgttttccatcattgagacggaaaatagtaataacatgttttctcccctggacttgagagcaagcttcaaaaaggtgtctgattccatgaggacagccagcctttgccaggagagagccagcgtctgccatgaggtagagcctgtccgcacgcttgctgagcactcgtatgccgtctcgtccatcactgaggcctacaggagtcagcctccgagggaacaggacagcagctcatctgctaaaacaggaaaagaaactggtgatgctcttgccacaaaagcgaagccatgccgaaagccaaagccccaaacccaggattctgactcaaccacagaaaatatgccactctctctagtaacctgcccagaggtgaatcaagaaagaagcccacagccagctccagatctgtcacactcagagcctcccagcaatgaaggggatatccattttcccagggaagatgaaaatcagccctctgatgctccgggtccaggagcagcagaggtcccgcccctcgtttataactgcagctgttgttccaagtcctttgacagcagcacgctgctcagtgcccacatgcagctccacaagccgacccaggagccttttgtgtgcaagtactgcaacaagcagttcaccaccctcaacagactggaccggcacgagcagatctgcatgaggtctagccacgtgcccatcccaggaggaaacccaccgttcttggaaaactaccccactattggtcaagatggaacttcattcagaagcccggaatcattagggccagaaaataggattggcgaactatccagcgcggggagtgccttgtcagacgcggaccacatggtgaaatttgtgaacgggcagatgctctacagctgcatcgtgtgcaaacgtagttatgtgactttgtccagcctccggcggcatgcaaatgttcactcgtggagaagaacatacccttgccattactgcaacaaggtctttgcgctggctgagtacaggacgcgacatgaaatctggcacactggggagaggcggtaccagtgcattttctgtcttgaaacttttatgacctactacatactaaaaaaccatcagaagtcctttcatgctatagatcacagactctccatcaataaaaaaacagcgaacggaggcttgaagcctactgtctatccatacaaactttacaggctcttgcctatgagatgcaagagggcaccttataagagctaccggaattcttcctatgtaagtgctcaaggaagcagtcaaaggggtgaatctgcccctgatacgttcatcgttccgaatctgcaaagctctgaaatgcccacactggacttccaagatggcagaaacacgttgcccagcagccctgccgtgccagtggaaacaccttcacggcagggcgcacccacttctgccagagtaaaaaatgcagaaggcatcaaatggaggaagcaggcagtgaaaaccaatctcgtcgataacttcgattcaactgaggtgtcagtttcttccactggaaacaccgtcagcaccaccctacagacagagcccgcatgtgtttcatctgtgggcaaaggcagtgagcactcggcctctgtgatcagctacagcggctcggtgccctccgtcattgtgcacagcagccagttctcgtcggtgatcaagcacagcaacaccatcgctagcctgaccaacagcaaccacaagtccccttcacaaccggtggtcagcccgtccctgatcaaggacagcaagcccgagacagataaagccagtaaatctgcaagcagacccaaaagcattaaggagaaaaagaaaactgctccgagtaacaggggagaaataacagaggaggcaaaatatattgctgatcacggagggtcttcaggcaaaaccacaaacgctgaagaaaccagtaagattgaaacttatatcgcaaaacctgctctgcccggtacctccacaaatagcaatgttgcacccctttgccagataacagtaaaaattgggaacgaagccatcgtgaaaaggcatatccttgggtctaagctgttttacaaaagagggagaaaacctaagtatcaaatgcaggaagagacactgcctcgggagaatgacccagaaacccctggggacagcccccttgggctttgccaggctgaatgtgtagagatgagtgaagcatttgatgaagtgagtgaccaggactccactgataagccgtggcgcccatactacaactacaaacccaagaagaaatccaaacagctgagaaaaatgaggaaagtcaaatggaggaaggaacgcaggagcagaagccccgtcggccggtgcagatacccagccgaactggatcgtgcagaggtgaaactgcccccagataaggccttcgaagaagaagaagaagaagagaataaagagatgcccaagctgcagtgtgagctctgtgatggctgccctgatggggcagcaggggcgggagccgaaggcaagccccaccagcatctcacttcgaagccttacatctgcgagctctgtgcaaagcagttccagagctcctccacactcaagatgcacatgagatgccacactggagaaaagccgtatcagtgcaagacctgtgggcggtgcttctcggtgcaggggaacctacagaagcacgagcgcatacacctgggcgtgaaggagttcatctgtcagtattgtaacaaggcattcacactcaacgagacgctcaagatccacgagagaatccacactggggagaagcgctaccactgtcagttctgctttcagggtttcttgtacctctccaccaaacggaaccacgagcggaggcacatccgggagcatgatgggaaaggctttgcttgcttccagtgccccaaaatatgcaaaacagctgctgccctcagaatgcaccaaaagaaacacttatacaagaccttacctaagcaagaggaaacaggcgacacgtgccacgagaacgcggatctcttggaaagtcagctttgcactgattccgaagacagcgaacaaaaggatgacataaaagcctttgctgaaaacgtcctttga

SEQ ID NO: 2378 - protein, 1190 aa, Mus musculus; identical to SEQ ID NO: 2376

SEQ ID NO: 2379 - DNA, 4616 bp, Mus musculus
ctggcctcggtttgcagccaggaacctggccagggagtggttctcatagcggcagcaaatctcaaaaccgggagctcactgctgcgctctccccatctccccacaacccatcttaaccttttttcttcttctttttaagccgtaaggcggccttttcttatagatcaactttccaaatctaagcagtcagaatgagtgacgtcatgagaaaattatgtggagcacatctcaaccaggagttgaggaatccagaggacgaatgcggttggtaactcctgagcccagggagttggcagagtgtgggcttccaaggagccagcacctccgaaccgagctgtcttgaattgaggccatgacgtcctactgttcctgtggctgaaagagctgagtgctgtgtgacaaatactttgttgaaccaagactctgaggctgaaatgcaatgtcacttacaacattaatcagatcccgcatttaaggtaggaggaaaggtggactatttttaactcccagccattgcatccggtgcaagcaactccggctctcacgtttgtgtttgcagagcccgtgtcagtggtttgattttcagcaaatgtgacagtggcctttgcagtggtcagctctgagctttgaactctcagaggagcaaaggagaaaaaaaaattcaacacagcacctccttggttgcagcctcagagaatccttggataagaaacttctttttttcagtcctgttttgctgttgataaattcagtcctcgtgatcacggggctctcaagctgctcggcgtatgatttttggtgtgtgtgacaatcgcatctaaaacttgtgagcaagaagacggagaaatcagttggtctccatcgccttacataaaaatggccgagcgtcttgttatgctaacactgccctgagtgatacgcacagatcttgatatggaagacatggcgggctcagaaccaaggatttccgagtgatttctgccaaagcacagaagctaactccgtcaaggctggcgtgttctgagatgacagtcatgtccctctccagggacctcaaggacgactttcacagtgacacagtactctccatcttaaatgagcagcgcattcggggcatcttatgtgatgtcaccatcatcgtggaagacaccaagtttaaagcccacagcaatgtcctggccgcctcaagtctttatttcaaaaacatcttttggagccatacgatctgcatttccagtcacgtcttggagctggatgatctgaaagccgaagtgtttacagaaatacttaattatatctacagctctaccgttgtggtcaaaagacaggaaactgtcactgatcttgcagctgcagggaaaaagctgggaatatcattcttagaagaccttagtgaccgcaacttctcaaattccccaggtccttacgtagtctgcattactgaaaagggagtggttaaagaagaaaaaaatgagaaaaggcacgaagaaccagctgtcactaatgggccaaggatcacaaacgcgttttccatcattgagacggaaaatagtaataacatgttttctcccctggacttgagagcaagcttcaaaaaggtgtctgattccatgaggacagccagcctttgccaggagagagccagcgtctgccatgaggtagagcctgtccgcacgcttgctgagcactcgtatgccgtctcgtccatcactgaggcctacaggagtcagcctccgagggaacaggacagcagctcatctgctaaaacaggaaaagaaactggtgatgctcttgccacaaaagcgaagccatgccgaaagccaaagccccaaacccaggattctgactcaaccacagaaaatatgccactctctctagtaacctgcccagaggtgaatcaagaaagaagcccacagccagctccagatctgtcacactcagagcctcccagcaatgaaggggatatccattttcccagggaagatgaaaatcagccctctgatgctccgggtccaggagcagcagaggtcccgcccctcgtttataactgcagctgttgttccaagtcctttgacagcagcacgctgctcagtgcccacatgcagctccacaagccgacccaggagccttttgtgtgcaagtactgcaacaagcagttcaccaccctcaacagactggaccggcacgagcagatctgcatgaggtctagccacgtgcccatcccaggaggaaacccaccgttcttggaaaactaccccactattggtcaagatggaacttcattcagaagcccggaatcattagggccagaaaataggattggcgaactatccagcgcggggagtgccttgtcagacgcggaccacatggtgaaatttgtgaacgggcagatgctctacagctgcatcgtgtgcaaacgtagttatgtgactttgtccagcctccggcggcatgcaaatgttcactcgtggagaagaacatacccttgccattactgcaacaaggtctttgcgctggctgagtacaggacgcgacatgaaatctggcacactggggagaggcggtaccagtgcattttctgtcttgaaacttttatgacctactacatactaaaaaaccatcagaagtcctttcatgctatagatcacagactctccatcaataaaaaaacagcgaacggaggcttgaagcctactgtctatccatacaaactttacaggctcttgcctatgagatgcaagagggcaccttataagagctaccggaattcttcctatgtaagtgctcaaggaagcagtcaaaggggtgaatctgcccctgatacgttcatcgttccgaatctgcaaagctctgaaatgcccacactggacttccaagatggcagaaacacgttgcccagcagccctgccgtgccagtggaaacaccttcacggcagggcgcacccacttctgccagagtaaaaaatgcagaaggcatcaaatggaggaagcaggcagtgaaaaccaatctcgtcgataacttcgattcaactgaggtgtcagtttcttccactggaaacaccgtcagcaccaccctacagacagagcccgcatgtgtttcatctgtgggcaaaggcagtgagcactcggcctctgtgatcagctacagcggctcggtgccctccgtcattgtgcacagcagccagttctcgtcggtgatcaagcacagcaacaccatcgctagcctgaccaacagcaaccacaagtccccttcacaaccggtggtcagcccgtccctgatcaaggacagcaagcccgagacagataaagccagtaaatctgcaagcagacccaaaagcattaaggagaaaaagaaaactgctccgagtaacaggggagaaataacagaggaggcaaaatatattgctgatcacggagggtcttcaggcaaaaccacaaacgctgaagaaaccagtaagattgaaacttatatcgcaaaacctgctctgcccggtacctccacaaatagcaatgttgcacccctttgccagataacagtaaaaattgggaacgaagccatcgtgaaaaggcatatccttgggtctaagctgttttacaaaagagggagaaaacctaagtatcaaatgcaggaagagacactgcctcgggagaatgacccagaaacccctggggacagcccccttgggctttgccaggctgaatgtgtagagatgagtgaagcatttgatgaagtgagtgaccaggactccactgataagccgtggcgcccatactacaactacaaacccaagaagaaatccaaacagctgagaaaaatgaggaaagtcaaatggaggaaggaacgcaggagcagaagccccgtcggccggtgcagatacccagccgaactggatcgtgcagaggtgaaactgcccccagataaggccttcgaagaagaagaagaagaagagaataaagagatgcccaagctgcagtgtgagctctgtgatggctgccctgatggggcagcaggggcgggagccgaaggcaagccccaccagcatctcacttcgaagccttacatctgcgagctctgtgcaaagcagttccagagctcctccacactcaagatgcacatgagatgccacactggagaaaagccgtatcagtgcaagacctgtgggcggtgcttctcggtgcaggggaacctacagaagcacgagcgcatacacctgggcgtgaaggagttcatctgtcagtattgtaacaaggcattcacactcaacgagacgctcaagatccacgagagaatccacactggggagaagcgctaccactgtcagttctgctttcagggtttcttgtacctctccaccaaacggaaccacgagcggaggcacatccgggagcatgatgggaaaggctttgcttgcttccagtgccccaaaatatgcaaaacagctgctgccctcagaatgcaccaaaagaaacacttatacaagaccttacctaagcaagaggaaacaggcgacacgtgccacgagaacgcggatctcttggaaagtcagctttgcactgattccgaagacagcgaacaaaaggatgacataaaagcctttgctgaaaacgtcctttga

SEQ ID NO: 2380 - protein, 1190 aa, Mus musculus; identical to SEQ ID NO: 2376

SEQ ID NO: 2381 - DNA, 3757 bp, Mus musculus
cggactcgcaggtccggaagcgccatggaccccgcgggaagcgcgcgggcggcggagcggagccccatcttgatatggaagacatggcgggctcagaaccaaggatttccgagtgatttctgccaaagcacagaagctaactccgtcaaggctggcgtgttctgagatgacagtcatgtccctctccagggacctcaaggacgactttcacagtgacacagtactctccatcttaaatgagcagcgcattcggggcatcttatgtgatgtcaccatcatcgtggaagacaccaagtttaaagcccacagcaatgtcctggccgcctcaagtctttatttcaaaaacatcttttggagccatacgatctgcatttccagtcacgtcttggagctggatgatctgaaagccgaagtgtttacagaaatacttaattatatctacagctctaccgttgtggtcaaaagacaggaaactgtcactgatcttgcagctgcagggaaaaagctgggaatatcattcttagaagaccttagtgaccgcaacttctcaaattccccaggtccttacgtagtctgcattactgaaaagggagtggttaaagaagaaaaaaatgagaaaaggcacgaagaaccagctgtcactaatgggccaaggatcacaaacgcgttttccatcattgagacggaaaatagtaataacatgttttctcccctggacttgagagcaagcttcaaaaaggtgtctgattccatgaggacagccagcctttgccaggagagagccagcgtctgccatgaggtagagcctgtccgcacgcttgctgagcactcgtatgccgtctcgtccatcactgaggcctacaggagtcagcctccgagggaacaggacagcagctcatctgctaaaacaggaaaagaaactggtgatgctcttgccacaaaagcgaagccatgccgaaagccaaagccccaaacccaggattctgactcaaccacagaaaatatgccactctctctagtaacctgcccagaggtgaatcaagaaagaagcccacagccagctccagatctgtcacactcagagcctcccagcaatgaaggggatatccattttcccagggaagatgaaaatcagccctctgatgctccgggtccaggagcagcagaggtcccgcccctcgtttataactgcagctgttgttccaagtcctttgacagcagcacgctgctcagtgcccacatgcagctccacaagccgacccaggagccttttgtgtgcaagtactgcaacaagcagttcaccaccctcaacagactggaccggcacgagcagatctgcatgaggtctagccacgtgcccatcccaggaggaaacccaccgttcttggaaaactaccccactattggtcaagatggaacttcattcagaagcccggaatcattagggccagaaaataggattggcgaactatccagcgcggggagtgccttgtcagacgcggaccacatggtgaaatttgtgaacgggcagatgctctacagctgcatcgtgtgcaaacgtagttatgtgactttgtccagcctccggcggcatgcaaatgttcactcgtggagaagaacatacccttgccattactgcaacaaggtctttgcgctggctgagtacaggacgcgacatgaaatctggcacactggggagaggcggtaccagtgcattttctgtcttgaaacttttatgacctactacatactaaaaaaccatcagaagtcctttcatgctatagatcacagactctccatcaataaaaaaacagcgaacggaggcttgaagcctactgtctatccatacaaactttacaggctcttgcctatgagatgcaagagggcaccttataagagctaccggaattcttcctatgtaagtgctcaaggaagcagtcaaaggggtgaatctgcccctgatacgttcatcgttccgaatctgcaaagctctgaaatgcccacactggacttccaagatggcagaaacacgttgcccagcagccctgccgtgccagtggaaacaccttcacggcagggcgcacccacttctgccagagtaaaaaatgcagaaggcatcaaatggaggaagcaggcagtgaaaaccaatctcgtcgataacttcgattcaactgaggtgtcagtttcttccactggaaacaccgtcagcaccaccctacagacagagcccgcatgtgtttcatctgtgggcaaaggcagtgagcactcggcctctgtgatcagctacagcggctcggtgccctccgtcattgtgcacagcagccagttctcgtcggtgatcaagcacagcaacaccatcgctagcctgaccaacagcaaccacaagtccccttcacaaccggtggtcagcccgtccctgatcaaggacagcaagcccgagacagataaagccagtaaatctgcaagcagacccaaaagcattaaggagaaaaagaaaactgctccgagtaacaggggagaaataacagaggaggcaaaatatattgctgatcacggagggtcttcaggcaaaaccacaaacgctgaagaaaccagtaagattgaaacttatatcgcaaaacctgctctgcccggtacctccacaaatagcaatgttgcacccctttgccagataacagtaaaaattgggaacgaagccatcgtgaaaaggcatatccttgggtctaagctgttttacaaaagagggagaaaacctaagtatcaaatgcaggaagagacactgcctcgggagaatgacccagaaacccctggggacagcccccttgggctttgccaggctgaatgtgtagagatgagtgaagcatttgatgaagtgagtgaccaggactccactgataagccgtggcgcccatactacaactacaaacccaagaagaaatccaaacagctgagaaaaatgaggaaagtcaaatggaggaaggaacgcaggagcagaagccccgtcggccggtgcagatacccagccgaactggatcgtgcagaggtgaaactgcccccagataaggccttcgaagaagaagaagaagaagagaataaagagatgcccaagctgcagtgtgagctctgtgatggctgccctgatggggcagcaggggcgggagccgaaggcaagccccaccagcatctcacttcgaagccttacatctgcgagctctgtgcaaagcagttccagagctcctccacactcaagatgcacatgagatgccacactggagaaaagccgtatcagtgcaagacctgtgggcggtgcttctcggtgcaggggaacctacagaagcacgagcgcatacacctgggcgtgaaggagttcatctgtcagtattgtaacaaggcattcacactcaacgagacgctcaagatccacgagagaatccacactggggagaagcgctaccactgtcagttctgctttcagggtttcttgtacctctccaccaaacggaaccacgagcggaggcacatccgggagcatgatgggaaaggctttgcttgcttccagtgccccaaaatatgcaaaacagctgctgccctcagaatgcaccaaaagaaacacttatacaagaccttacctaagcaagaggaaacaggcgacacgtgccacgagaacgcggatctcttggaaagtcagctttgcactgattccgaagacagcgaacaaaaggatgacataaaagcctttgctgaaaacgtcctttga

SEQ ID NO: 2382 - protein, 1190 aa, Mus musculus; identical to SEQ ID NO: 2376

SEQ ID NO: 2383 - DNA, 143177 bp, Homo sapiens
catggctacacccgggagttcccgcctctttccatggcaatgacccgatgacgcagaagttactccccttttcctagaaaattctgcataaaccaacacttaatctgcatgcaattaaaaataggtataaatatgaccatagaactgccctgagcagctactctctgcctatggggtagtcctgctctgcaggatcagtcatggagctgtaacactgccacttcaatcaagctgttttcggctaccctgccaccagctagcccttgaattctttactgggcaaagccaaggaaaaagccacattttgtggctctcctgtcctgcatcacaaccgctcctagggagctacaaccactggtaactgagtgtcttctgacagacagtttcatgaagtacaggcttcccagaggtgcctgtcccttctcccatgttgctccatgttaccacatttcctacctgggtagacctttggagatccctgagatccttttagggaatctgcaaggtcaaaactgttttcacaataatactaagttttatttgcatttttcactgtagtgacatttacgtttaaaatcataggtaaaactgctggaaccttggtgtgattcaaggcagtggcaccaaactatattggcagttactgtatttttcaccagtatacttgtaggggaaggggatgggaaagccagttccacttaatgtccttaatgaagctgtaaagagtattcattttactccattttgagccttgattacatgacgtttaaatattttgtgtgacaaatgggaagtgcgcataaagcaagtctgctgcacaccaaggtattatgtcctgaggaaaagcagttctgtgcttgagttcgtagctgaactagacctttttttctggaaaacacctcttttattttcattgtatttttgcaaacttttatttatttatttattttactttaagttccaggatacatgtacagaatgtgcaggtttgttacataggtatacatgtgccatggtggtttgctgcacctatcaacctgtcatctaggttttaagccccgcatacattaggtatttgtcctaatgctctccctccccttgtccccaccgccgacaggctccagtgtgtgttgttcccttccttgtgtccatgtgttttcatcgttcaactcccacttatgaatgagaacatgcagtgtttggttttctgttcctgtgttagtttgctgagaatgatggcttccagcttcatccatgtccctgcaaaggacatgatctcattctttttgatggctgcatggtattccatggtgtatatgtgccacattttctttattcagtctatcattgatggccatttgggttggttccaagtatttgctgttgtgaatagtgctgcaataagcatacgtggaaaacacctcttttgataactgatagtatgattgggacctgagtatttaatagacattttctaaaaaaaacaaagtaagctaatcacttcaaaggaaacaactgacattatttgatgccaatgagaaaatttgagttttcaagaaaaaggttagaattttgaaaaacttatccaggctggacgtggtggctcacgcctgtaatcccagcactttgggagccaaggaggacagatcccttgaggccaggagttcgagaccagcctgggcaacgtggcaaaaccctgtctctacaaaaaaattagctgagcgtggtggtgtgtgcctatggtcacagctgaggctgaggcagaaggatcacttgagcctggcaggtcaaggctgcagtgagccacgtttgtgccactgaacttcagcctgggtgacagagtgagaccctatctcaaaaaagaaagagaaaggaaacatatctgccaccacaagcttaacaacatcccaatacttaaaaagtttttctgatgagcttggtgatggtattaataaacgtgattttaaaaaatattgaataatgaaatgtgccaacatttggaagatctgcataactccatgcagaaaaaaaaaaaccaacttcactttttttttttttttttttttgagatggagccttgctctgtcacccaggctggagtgcagttgcatgatctcagctcactgcaacctctgcctcccgggttcaaggaattcccaggcctcaccctcttgagtagctgggattacaggcgcccaccaccacacctggctaattttttgtattattagtagagacagggtttcaccatgttggccaggctggtctcgaactcctgacctcgtgatccaccacctcagcctcccaaagtgctgggattacaggcgtgagccactgcgcccggcctaagctccacctcttaaagtgaggagtatcaaagaatatgtggacatattttaataacactacacttaatgaaccagtattttattcatgatggtacaaaaccatgatggatgggtaagaaaaaaaaaatctattccaattgcaagacagtccaatggatttttaatgtaataataactcaagaagttaatggatgtagttctagattccactttgcttttaaacattaacaagctatatatttgttgagttttggtatagtatccaagaataatattcacaattgcctgaaaagctgttaaaataatctccccatttccaactacctatctctggtagaccagattttctgcatatactttaactaaagcatcagaatagacaggaacgtggaagctgagaacccagctgtcatttattaagccagacaattaaagagatttgccaaagaaaaatttgatatattgggcctgaatgtgcattgtttggctctaaaaaaatttatgcacatttcacagcttcctgagtctgtctctgcaacatagttgtgattttttctttttcaacagatggggtcttgctctgtcacccaggcggtggggcagtggcacaatcatagctcactacagccttgaactcctgggctcaagcaatcctcttgccccagcctgctgagtagctaggattacaggtgcatgccaccatgcctggttaattctttctatttttgagagatgggatctcactacattgcccacattgttctcaaactctggtcccaagttgctggaattacaggcttaaaccaccacacctgttttgtaacctgagcgcctccagacttctagccacatgtgcgatctcaatggattctggcgtagtctctctctcccctagggtcaggcaagatatcatcatttgtcatacatacatatacagcgtctatcagattctctcacaaaaagccctcatgaatagatatatactggggtggctgccataccctgaatccactttagacccctttaggaattcatctgagcaccttctaaatggaagtccacaagaggcataaaggtggcctcactacaccatggttgagtgagtggacctgctcccagtgtgatcaccgtatgtggtcccagggtccctccctctcaccaaagggcctttgggctaggaaagcaaatttctcttaatgtaactcttagaaattcataaatcaaagacaagtttccttctcttaatgtaactcttagaaatccataaacctgttaccagttgaacatcctaatcccaaaatctgaaacccaaaatgctccaaaatttgaaactttttgagtgcccatatgatgctcaaagaaaatgcttactggacattttggattttggattttcagattaaggatgctgaactggtaagtataatgcaaatattcagaaatctgaaaaagtccaaaatacccctggtcccaagcattttggataagtgatacacaagctataataaaattatttttatttttatttctttataaacagggtctcgctctgtcacccaggctggaatgcagtggtgtaatcagagctcactgtagcctcaaccttctaggctcaagtgatcctcctgcctcagccttctgagtgtctgggcatacaggagagtgccaccacacccagctcctgtgataatattagagaattaaataattcaattaacaagattagtagatacttgagcaaaatttgggctttgccaacatggaagacagggcatgactattaggtaggcacaaaaaaatgcctgctacaattccctgtatatatttaaattatttccacaataaaatatattgcctacatgattaaagaaggaaagaaataaaggtaatgaatatgaggggaaaatggaaatataaaactaagaagtgatgtcatattttgaggtatttgagaagacatgctggtaaaataaacagactaatttgctaaaagccaattcaatgattgaccaattcaccacatttacttgctccttttacttatttacaaggtttttggcaattcatactggatggtattcttttaacagtttttgaacatttctgcaaaatatttgttggccagtattcctttatatctgtataacagcattttaaggaatattcaatctgtctcagcccagttagttagaagacagggtatatgtagaagaaaaatattcacaagataaataaaaaataaatcagtaagaaaaaggcaacccaattgaaaaatggaaaaagaatgttaacaggctgtattagtctattttcacactgctgataaagacatacccaagactggacaatttacaaaagaaaaaggcttaatggacttatagttccacatggctggggaggcctcacaatcatggctgaagacaaggaggagcaagtcacgtctttcatggatggcagcaggcaaagagagcttgtgcggggaaactcctcttataataccatgagatctcatgagacttattcactatcaaaagaacagcatgagaaagacctgcccccatgattctattacctcccaccaggtccctcccacaacacatgggaattcaagatgagatttgggtggggacaaagagccaaaccatatcattccacccctggctcctctcaaatctcatgtctttatatttcaaaaccaatcatcacttctgaacagtcccccaaagtcttaacccatttcagcattaactcaaaagtccacagtccaaaatctcatctgagacaaggcaagtcccttctacctatgagcctgtaaaatcaaaagcaagttagttacttcctagatacagtgggagtataggcattgggtacatacagctgtcccaaatgggagaaattggccaaaacaaaggggctgcaggccccatgcaagtccgaaatctagcagagcggtaaaatcttaaagttctaaaatgatctcctttgactccatgtctcacatctgggtcacgctgatgcaagaggtgggatcccatggtcttgaacagctccaccccagtggctttgcagggtatagcctccttcctggctgctttcacaggctggcgttgagtatctgcagcttttccaggtgcacagtgcaagctgttggtggatccactattctggggtttggaagatggtggtcttcttcttacagctccactaggcagtgctgcattagggactctgtgtgggggctcctaccccacacttcccttctgcactgccctagcacaggtactccatgagggccctgcccctgcagcaaacttcttcctggacatctaggtgtttccacacatcctctgaaatctaggcagaggttcccaaactcccaattcttgacttctgtgcactcgcaggctcaacaccttgtggaaactgccaaggcttggggcttgcaccctctgaagccacagcccaagctctacattggcccctttcagccacagctggagtggctgggacacggggcgccaagtccctaggctgcacacagcacagggaccctgggcctagcccatgaaactactttttcctcctaggcctccagacctgtgatgggagggctgccatgaagacctctgacatgccctggagacattttccccattgtcttgcagattaacatttggctcttcattatgtaaatttctgaagcgggcttcaacttctcctcagaaaatgggattttcttttctaacgcattgtcaggctgcaaattttccaaacttttgtgcactgcttcccttataaaattgaatgactttaacaatgcccaagtcacctcttgaatgctttgctgcttagaaatttcttccaccagacactctaaatcatctctctccatttcagagttccacaaatctctaggacaggggcaaaatgctgccagtctctttgctaaaacataagagtcacctttgctccagttcccaacaagttcctcatctccatctgagaccacctcagcctggatttcattgtccatatcattatcagcattttggtcaaagccattcaacaagtctctaggaggttccaaactttcccacattttcctatcttcttccaagccctccaaactgttccaatctctgtatgttacccagttccaaagtcacttccacattttcaggtatcttttcagcaatgcccccactctactggtaccaatttaatgtattagttcattttcacactgctgataaagacatagctgagactgggcaatttacaaaagaaagaggtttagtggacttacagtcccacatggctggggaggcctcacaatcatggctaaaggcaaggaggaacaagtcacatcttacatgaatggcagcaggcaaagagagagcttgtgcagggaaactccccttataatatcatcagatctcatgagacttttttcactatcatgagaacagcatggaaagacctgcccccataattctattacctcccaccaggtcttttccacagcacatgggaattcaagatgagatttgggtaaggacacagccaaaccatatcacaggtaattacatagtcagaaacacaattggacaaccaacatatgacagcattttcaacattactagtattcaaaaaaatactaaataaagtagcagtaagatgtttattttcacaaagcatattatcagatagttaaagagtaatagggttattgaaggtatttctgagatcaagtctttttgttgagtttaatgttgatgtgcatgtaaattggtacagcatttgtggtaggcaatttggcccccttatcaacattaaaatgcttgtgatcactttgaggtagtagggagctggggaagagtgggaggggctaggggagtggacacaatgggaggtactaaaggactggaatgtaaagggggggatgtgtggggccaggagggatttggaagaaccaggattgattggaggagggggagaggagataaaaggcacttagagggactggtggaaaaaaaacaagagagattggaaacaactgaagaaacttagagggacaggaagagaaggggtgggactggcagggactacacatgtaaaatggaaacaactggcattcagcaaattgacctacagccactggcaaatgggacctgttcacattgaccagggtccttcaggagaatgagatttgttagcaaacaggaaacagtgattttcagagtggtactaactgtgctttgcagagttcttttacttcctgttatcttgactctattattaccttgtattttgcttctacaaagcagcctgagctctttgaagactccttagtctaaagcctctgatggccaatggtctgcatctttcccatgtgctcctgaggtacaaaatggacatttcagctgcttttaatagaaactcactgtgtcactcataaaactcaggaagctgtcccaaatcctgggaggacatgaaaagaggctcactctgtagtcaagcacaggtatgcctaaggtgtgcaggtcccaagactctcccacttctctcttagtttggagtgggcattcttttaagaagtggaggaccctgtggtcactggcttccttagtggtgaatcatagggcaatcagagagcaggaatctgcaaaggggcgctgtcatgtgctgaattgtatctcctcaacatttatagattgaagccctagcctccagtatctcaggatgtgacagtatttggaggtggggcttttaaaaaggtggttaagttaaaatgaagccattagagtggtccttaatccaatatgactggtctccttataagaagaaacttgtacacagaagagatacacaagggacatggaggcacagagaaaagcccatgtgaagaggcagcaaaagagtggccatgtgcaatccaagaagagaggcctcagaggaagccagccctgccaacactttgatcttgaactttcgggttccagactgtgagaaaataaatttttattgtttaagccacccagtctatggtgttttgttatgacagccctaccagaggcttgaaagcctaaaggcttagggtcctgggaaaataaaagttaattcaagtcctccagttaactgttattaggaactatttgaaaataccttctttaagtatagaagaggcccctgctacactcccatacacatttttacttattgtttaggaagtgtggagcttgctgttacactgccctaaaagttcctgggttgagccggttgccaatagtaagttggtaaagaaaaatagggatgtctggccaattaggctgggtctttcagttatcatagcttctacccctgctgaaggattagtcttgggctttgtagattcaaaaaaaatttcagttcaggcctaagtaagtaatttacatactagttctaagtaattaattggaactcactggttaacaatgagaaccatatttttcaagaatactgaactattcatggtagactagtcctaaaaaatctttcccattaggaagagctaagtgaagacaaaaaaaaaaatttaccttggaaggatccttgtgacccttgtcccactgaaagatcacttcctcaggaatgctttctctcagcttcctggggagcattagattgcctctgctctgagatcccaaggaaccttctgtcagaaacctcaacccagttttttaattagttgagtataagcctgcatttcccattagactgtgagctccaagaggaaagggattgtgtcttacctatcaagttatattaatagtatctagattttaaaaggaggctgagaacagtggcccacacctgtaatcccaccactttgggaggccgagatgggcagatcacttgaggtcaggagttcaagaccagcctgaccaacatggtgaaaccccatcactgctaaaatataaaaattagctaggcatggtggtgtgtgcctgtagtcccagctacttgagagcctgaggcaggagaatcacttaaacctgggaggcgaggttacagtgagccaacatggcaccactgcactccagcctgggcagcagagtgagactccatctcaaaaaaataacataataaaataaaataaacaggagaatgaatgaatgaatgaaattatgatagtccatgtctataggacatggcttccaaatggacagaagatcagtcaatcatccatccatccatcccgccagtgctgatgacacgctgataaatccttattccctagcttttccagactcttcaaggataatcactcttctacagatagttatttgtcctgtacccttctgttttgtctgaattaacaaatagtcttttccctgattgtattcacaaagaggccccttactctcaccacaaaactatcttcaaatcgcaacacagcatgaaaaatttctgggagagccttctagaagaaacgtgttctccataaactatgatgcctgtgatctatagtccctgatctggcctccaggtgtttaacccatctcagttttgggtttgctcacctctgtccactgactgtgcttcctacacattctgaatgggctattacacccccaactccaattcttcaggttagagatttgagtgtggtcatgaagattgatggatatcagttaagcaaaggacattgtgtaaatattgagcctgggaaagccagggacttgagctcaatttttagaggtcaaaaatcataaagaaatctgaaattcaagaagctgattcctaggcaagtgcagacatccaagggtttcatgtttcctgttagggcaggactggaggcctcagtatagatgagcctgagcctaaagatgtggatgcttatatggtcttgctgagctaagagaaagataaaaaagggacacaacctcagactagttaaaagttgaaggggtaggttctttgggctctggtattccaaagaaactagccaaacttggcagattcaagtttaaacattgtctttttctttgtataatccctatctacattccagttgatttttcaacatgccccctgcatgttgctgaattttaagcttcatgagggcatgttcactgctgtgtccccagcaccatcacctagaacagtggtaatcaacaagcatttgctgaatcgatcatcaacagatgtatatatgggtagatggatgtatgaacaaatctgtttccaatccattgtacagtgcatactcctggtccccatgatgatttgtgattctctctgtgataggtccctttgtccagccatctgcctcttggtagctctgaaggcccttagtcatttggctcaaaatccctagctttggagactagcttcttattaactaagccattgcaccacttgttcttgtagccttaaattaatttgagttaattcttaactgtttcccttctgtacgtgtgtcatttaatggttttcctttatctgattttccccaattcttcctgtgcatttgtggttgtccacagaagccctctagccaaggcctcgggcagccctaccaaatgaatatgggcacttgagttttctaggagggctttcctgctgccctgggtctcatccaactggtatccatctaaacattcccacccagggttattcatgctagaggaagaagaatgccctttccagagccagttcttggggaaaagaggaactgttgatatagccagagcccgaaaagaagattactctgcaacagctaaaggttggtgacatactttttctccaacttagtgaaagctctctatgtttgctttccttctcatgaattccattagtgtattttctctaaatgacccttggaacagataggaaagattttaaatcaatagaataagcttcatggagaccaagagtttatctattattgattccccagcatctagcgtagtgcctaacatgttgatgctcaataaatcattgatgaagaaagaaaagaaagacaggtggaaaggagggcagaagagaaagaaaaagggtttggagaataggtatgaatgtaaaaagtgttaatgtattattcagaaatcatgtgacgataacagtcttgttttcaaagtaattgggtatattatccctgctatctggagtcaataaagcaattgaagttactttgtaaaatgaagagtgtatttataaagataaaataatagcagacaagcagaataacaacaaaaaaggtattctttgaaacttaggtttaaacagtagtgatcatatattaagataaattcaaaactctgtaacattaacagccgtttgttctgtgtctatgccagttttcaaaagcaaactaaaacagtgaagaactttattttggtgtacaaacagatgtcttatggataaatgcaagctgatcatggtggtgatagaattgactgcaactggtccatttgatatttagaaaaggtcaactaatcaggaatgatacactgaggaaatttacaaatatctaaccttcctgccatttagtaaaattaaccacacagtaatttagcaaaggctcaaaaatatttaattgtgtgtcaaggaaaaacatttcagtgcagggggaataaattaagaaaattagcatttttttagtatcagtctttcatttatttgagatcatacattgacacacttcaggtccagcaagccaactttaaatgacatacactgttcattgcaaaagaacccacctaaagtggagatagaaggggagtaattaaacatagtttgtacagagtcaggctgttaagactaagggattctttcttcagcaacccgggtagcaacacatattaaagttctcaaggttaggaaaagtcactatatttgtatacttccttaatttggggaaaataaaatgtaacctaggagaaaatataaaaacatctccaaggcaaattcagaaaaatcttccttttaacaccagctttgcaaagattgcattagtgaagcatagagtttggtgagttgaagtgtttgctagactaattgagactaccatgattaacacaactgtaaaaaagacaaaccaacaaacaaacactcttgataatttaagcagacgatggctggtgactagcaaaacaaataaatatacatcttagctgctgtgggttgttcctaaagttataataagatgattaaggttttacctgtgcgatcaattttacttgtgaaactgactaatgaaagtgttcagagtcccacacttcagccagtataatttttgccccatcttttaaccacttgtgctgccatttaacatgttttttctttaattaaaaaaaaagtaacaacattttttaaacttagtggatattgctatctaaaatcatctcgaagaggcattctttggaaaacatgtcaataccaaagtaataacaataataatgataagttaagactatttcaaagtaattctatgagatagagacatactggtagagaagaaatcagaatccttagagctcatgggaaaatgttgaggtaaatcatatgctcagattacagtttgctctttgcagctttatttaagaagcaagttaatgtttacatgacattgaatttcaaagtccaggcaataaggaggaaaagagaatgagagaaaaacagttaatgtgctttgcctccttgctcctcccaacccatggagaggcatgggggttgcaggggagcagggtgggggacaggaaatggccactggagggaacaaaagcaggggggttaaggttttatcttatcagagtgcaataatgttttattaaattgtaaaaatttattgtgctaagatacaagtactatgtttcctaactcacatgacagttattcttgttagagtttcagtatctttaaataataatcctcttttctacagtcttggtgtgaaactctgtgccttaattctctttgaagtgatccaatctctgatcatgttgtgtttttttacaatgatactcttggtttacaggaacaaagtgttgtttttggaacaaagtaggactttatttatctataatacaatgaaaagatcctctgcatcattattcttttcaagtacttcctttccaattcctccctcttgaggggggtggtgtcattattcctgactttgcagttaggccaggctcgtttgtggcaccagtagaacaaagggtgaggctttgccagatggacccctggacaaggaggcatccttctaggcctgcttcgaaggggacctccatgcccgaagggaagtcattttacctgcattttaaaatcttgtgatgtagtttttttgaggtgtttgtatttagatacatttagaaatattaagtcccataaaaggtccctataaagtcaggctctatagttgacaggcctgtgtgttcttaaaagggtgtctgaaagaaaggaaaagaagctgaagagatgttctcttcaaatgaaaaggcagggtgagatttaaaaagctgactgcctctttcctcaagaaggtggggcataactccatactccttaagtgtgggccacacatagacttccttccaaagagtacagcatggaaagggggaaaaagagaaatctgacaaacactatcttagccaggcgatcaaggtcaatatcaacagtgatgatgttgatggtctgtaccttgatatgatgtgacaggaacagcaccttacctctgcggtcttcctcccccaaacccatgaccccagtccaaccgtgagaaaaatgtcagactaaaattgaagaaaattctataaatacttgaccagcacttctcaaaactgtctgggtcatcaagaaaacaaggaaaatgtgagaaactgtcaaagcccagaggagcctaaggagacgtgacaaccagatggaatgtggtcacctggatgcttccttagaacagaaaaaggacactagttaaaaactaaggaaactgattaaagcttggactttagttaatgatactatatctgtattggcctgttagttgtaagaaatgcaccacactaatgtaatacatgaataatggaggaaactgggtaatgggtatatgggaattctttgtactatcttgtcaacttttctcaaaatctaaaaactactgtaaaatagaaagtttattttaaaaatatataaagctaattgccagggaaacgactggttggaaagctactgagactctgtgtcttccaatctttcctgaaaacccttgagaaattttataaccacatgcagaactaggtcatgcctctggtggctgctgcaccaagattaatggggaaagattctagttgtatagtctaatgcttgaagttcaagatgggaaagccaggagaaaaggtaaggtaattcatcattttacataatatattcatcattcattcgttcgcacgccgctgcacagaaacagtgacaccctctcttccagttcaccttctcccagtctccttcatggacttctctgtctatccatgcttaaaggtggtgtttttcatacaatttaatgtgcataataccctacatttttctgtcctcagcctcatctaccacttatttgccaatgactctcagatctagagatagatccacttgtctacagccatccccatttgaatatcccacatgcacagcacatctgcaatggcacttagcacctcctcaaaacttgttgaagccactactcttttcttaatctctctttctgtgaatgatgtcaccaccccctcatttactcaaatcagaaactcaacctgaacttcttgtccatcccagaaatcccctcagctaccaaactgtgcacactctacctcctaaatgtttcctgggtctaggcccttccctccaacctcagcaccttagccagcttcttatcatgtctcatcacagagcccctacctggactcctccagcccctgggtaacccccacactccccacacagagcgtctctaaaacacagcccaaccacaccactcctgtgctgacaaccctccaaggcgctctgtcacccctggaatgcagccaggcttctctgcctggcacacaaggcccttctttcccctcttgtcattccctcctcatctcctttcatgttcccaaacgcaccttctgctcccaccaaactactggggattccctttcccaatttttcccatgtcctactcctacttggtcttcaaaattcaacccaagctctctttgggagcattccctgagccctccaggcctcctcctgagtgctcccataggtgctcctcccctacctgtctccccgtcccccagtcgtgcatagctctgccattgctctcattctttcatccaataattggctagtctgaatactacaaatacaacagcgaacaagccacaaaagaaaaaaaccccgcctccttggagcttttactctctgcacactagttttcctgtcttttccccttgaaggtgagaaccatcctttatatgcttcttaagcacttagcatagtgcccagcacatggccagtgctcaaaaatatagatgagtatgtgaaggaaggtccctgactgtgttcctcccatccttcatgccattcaacgaaaggaattagagaaatgccttcaacatgctcaggaaaaataacttcgatacatcactccatcccttcccacatccttctcccagcttaattttatttccctcggagcggcacacgtttaatgactcgtgactgtacatccttctttgagggtctccacttgcctctggaaagaataatactgccacaagcagagtattatacatgctacttgtttgtttttaattttaacaatcaacgtatataagcacaaagaattatatttctagggcaagacatacaagttataaaacgtggtgccatgtagcagtgatattaagggacccagaggttagggacaggggaggagagcagaaatggaaggttaattttctcatcttgtaaaatggaagtttccagatactgcattacatttatgtgtcaataactagaatcctatatttcaacctctattgcttttcattgtacagcttttggtactgtttggatttttttttaattagaaaattttagaaaactcgttggaatagaaaaataatgaagggtggtgaggcacggtggctcacgcctgtaatcccagcactttgggaggccaaggtgggtggattgcttgagcccaagagttcaagactagcctgggcaacatagtgagaccttgcctctataaaaaaatttatatatctacatatattgtatatatatatcacatataatttatatacatttatttatgtatgcatgtattttatatatataaaataatgaaggagagatgacatatttattgtggaagaaaggtggcacagtcaccaggaggttctttgaagagttccttcctctggagtcatgatgggcactgggaggtgtacgtgtccagtgttgactatagccagtggcctcagggagtgtgtctggtccagctttcagctgacagctttctcatcagtgctgggtcactggctgcagctgcaattaatgcgctctcctgactaagggtaccatggaacgtcctctgcctttgccccccagagccttgggaacagattcctggaaattctgagcaaggtgctagcaagtccattgcaacccactcaccagaaagccttcctccactgatgggggatgtacggtggctgtctttgtccctctgtgtcccttttctgatgatgtcattctcatccaccctgtggagttgttggaaagaacacagcctctgaaaccagaggaccaggatgagagggtgttcaggccctcccttgttcagggaccttgtgtcagacactcagactctttatgcttctgttcttgccaccctgcccaaatgcactgctgtggtttgaatgctcccctcaaaattcacgtggaaacttaatccccaatggggcagtattgagaggtgaggcctttaagagttgattgaatcatgagggctctgccctcaaaagtggattaatccattcatggattaatggttaaagggttatcacaggaggggaactggtggttttacaagaagaggaagagaacctcgccatgcgatgccttgtgctaccccaggactctgcagagagtccccaccagcaagaaggctctcaccagatgtgacccctcaacctggaacttcctggcctccataactaaaggaaatacatttctttccttataaaatacccagttttaagtattctgttataagcaacagaaaacagacatgtactttccccatgtctccagatccttataatgatcaaagagaagatatatgtagagttcctctgtcagctcaaatattattactagcagcatctctttgaacttttgtttataagatcttcaattccaactccatctcatgagtcatgacatcaactctaaatatctcatttactcttctgttgaagcatgcactatgcaatgtgtgacacaggtgaacgtgtaccttatggaataacatgcctaagagctctggggtgattgggcaaagtccttggttatgttcccacctggagaatctatttcactctaggcaactactggacaaattcaggctactgattatgtaggagagagagacagagacagagctggctagccctaatatgtcaccatcaaattgtgtccagtgagggaatgtcttacactgtcgtccccatggaagtctgtagcctgagtacagctttcacctgtacagcactgatgtttatgcctgcttcaagaatgactgtgtttgggttgttttttgttttttgttttttttttattgctcacacacaaatgagaaggaattactgtatttttgtgtaggtgtttgtgttcactttgctggttttaggagagacttcaacatggggccattcttctctgtattccttaggctgcaagtgtgtcatagtaagctgaggctgagcctgaggctgggagagagttaaggtgtttcccattcatgggtttgagcagaagaggaaagatctgagaagcgctgaccgagccaggaagctgctttcaccagccgatgaacaagtgtctggtgatcatgcatctgtgcttggacaggattcttctgggaaggcctgtgagtcagggcccctgggagtcctcggctggggacttcaaatgagtcactgtgctttctgatgcctgacaaataagtggaagataatgcgcttgccttcagtctggaagacgtgtgaccctttggggaagagggtcagcagcggggaattgtgtcaccaacgtttctttttctgacccttggcctttcctgcagatccacgtcaaacaccataactgagcagcttgatgtctcatttttgtgcttatcttgtttttcatcctaatacttttttcctaagttgaatcattcagggctcttgatggcctctgaaatgagttgaattttcctagcctgtcattcaaattctggccccttcctattttcccattgagaatgccctgctactccaaccaaattcatcagctggccattccctgagtgcacccagacagttccacccttgctcacatttctcctcttgtctgtgtcttgtctacacaccccttctctttttatgtaaacctattgaaattctgctctagtcccacatactgggtggcagtggccccttccccaactactctagcacctggcaactcctctcagctctgagccctgcagccctagctgcacctccaaacttggcacaggctctcacccggccacctctcctttatgttggggatgtgtcttgtactttgctgtatttccagagcttgtcaggggctataatatgtaatgggtgctccatgatatttgctgtagataaggatgaaacgatctgccgccctgagcaatgccctgaatgcttgttcctggcgcccttggcttctagaagagcctgcagatggagtgggggagggatgccgaaagaagaaacccagagggcagctctgcttatatatcttctgtactgaggtttcaagtaacattagcttaagaaaaaagattctgtgctgaaaatttgaaaactactggaaactattgttattgtttctacacctaattgataaactaggggaaattcatacccgacattcagtggcacagagaactcatcagaaaaggaaggatacagaacaagtgtgggcattttacatggcaccaggaaaaaaatacctgtcctgtagaaaggggtttcttaaacaatgaacttgccaagaccatctaaattctagaagtttgcattttgggtctcaagaggtcacaagtgattgaagctccacagtgagttctacaaggggttggagatctggctcctttgtaaaatccttagcaggcctttgagggccccaggggacagtgtaaagcccagactcattgtttgctccggtaaagccttgttcggatacaggagacagaagccaatgccaactggctcagttaataggggactggggttggtgtgaggttataggtaaaggagacctaggacagcaagtcagactcagccaggcccaggaaaccagcacgggagagtcactcacatggttggttgctcactccaggcccacttcatccctgcttctgtctgcctgtctctgcttgacatctaccagcccagagtccacaagacctcatggctccaaagcctgctgctatctggatggccagccacagatggcctgccactcagatcacatttgtgagatggaggctcaggttgaccaggcacagcccctgctgggtccactccatgcctaatcagtgagaggaaggggttaccacaggatcaagaagcaccaacagggctggctgcagagggtggacaagtagagcccaggctgccaagacaagggcagtgtgggtggggaaagagtgcccagccttgcattgaccccttgcctagcaccctcatggacccagagacatctggccctgcaatttgttgggttttggagcacacactcactgtgtaagcacagtaatattgcagtggatattttcatagccagcttccaccaatgattgtaagttcttgcttcctcctagggctgcagtctagtttctccctcacagtgtggatcttacagcttagggtggaatctggttggccaatttttcagctttgacaacatggaaagtcagaaaatagactttcataaacagtgtggttgcctcttacataaaaggtagtgtctaaagtcagcacacacagggaaatacatggaatcaaaatgtctcctgagaatcctttgaatcacccataaagaatgggacgcatacatctctcaggaagcctaatatagccattttcttctagcactagacagaccatgtgtttttggctgacaaccaagcaatgtggttggtttgcattcaggatcatgtttaatgaaaaatctttagatcccttctcaggtatttaaaagaaaaaaaaaaaaagctatgtgccaaagaggcccatggtaacctagaacctcagggaaatgcaggttctctctgaggcatcttctcatgggaatgtgaggggggatgctttcaacattaaatcgcctccctgccttccttctttcctccctccctccatttttccttccttccttccttctttccttccttccttccttccttccttccttccttccttctttcctttcttccttccttccttccttccttctttcctttcttccttccttccttcctttccttccttctcccttcctttctctctgggaaggatatattgttaaattgccttaggttagctgtacatgggatgtcaccataagaggacagcacccctgtctgtccctctccccttctcgcacatggggatgagatactctctcaggcagggactgtcctgtggtctgcagtgcctctccctataccttccccagcccccggcaccacatatcctagccccctgcatgcgctacatcctgctgtaatgacccctgattaacgagttgattctaaccctgctgtgcccagttcctctacctgagaagtgagctttaacaaagaaggagacaggctgcataaaattaaaacacctgattttgaacaattagctagatatggaaggctaatctttcagatcatctttctaaaaatgaaaaaatggactagatctctggtccttaaacttggccatccatcagaatcacctgcagagcacagattctggttcagtagctctggggcaggtcaagaatctgcatgtctgacactaccgcctctgctgccgacactaccgcttctgctgccgtcaccactgccaggtctgccccactcaatgctggtgctaccggtcagccagaaccacactgcatatccctggaaagggtgcttggttggaaggcctttgtgagagaaacagccttagtgtccctcgtgcataaactgaggataatagttgtctgctcgtgttatgtagatttgttgcgagcactaaatgacttaatatttgtagtgtttagaactgtgtctgatacaaagtaatggccatacaagtgtttttaagtaacagtaatttttagagtcccatgcctattatccacaagtaaactctagtcttatacctctagaacaaatgaaatcaacttccttagatacagctgaaatcctggcctgagttcagctgaaagcctgggcttagatggctggaaaacaaaataagaagtgtgaatgttcctcataacttttcccagccctggagcacagataacctacaagatctggactgaatctgctgtttcaggcagcatgatgccctgggctgggctggaagagacaggaacaggcacaggccttccgtggctgctgccttggccactgatggcacaattatcattccccacaacagggcccagctagcctcagatcacctcccagaggcacctctgctgaactctccatgacatgttggtcccactagtttctatcaatcacatccgcatgctgtttcatcacaatagtaaccactgtttaaaatgacctgatttatgtgtatctgtttatttattatgccttctccactagaatgtaagcatttatgtctcatcctctactacaccccagcacctagcacaatgctgacacatagtagaatgctcagtaaatatgtgttgaatgtatgaaccacaagtgtcaaagggtatgaaattgaaggggaaaatatcatatattcttttcattttgcctgtcatcacctttctctctcttactactgtgagttgaaagctgctttctaagagccagtagtgtgaagcagactactagcagactgaaagcagacagtcctgtgctggaactgctaaccatgggagaagggaccctcccaactttacttggaaggctctcagtcttgcctgactgctggtcgatgggacgtttgtcttaaagtatcagcaaagtacaaaggcactggctggtgcctggatgagctttattctcagaaatattcacatactctaaatgggagatgtcaaacccatgccaatagctccattaaaacccaggcttcccaccaagagcaactggcatggttttctatttgcttctcttgaccatcagtgataaaatttactattttatatagagagacagaacatgtgttgggcatctcagtagttcaaaccaaagacagaaaaacacctcttacatgtatgtaatagatttttttaaatatacagttttcctttttttaattaattcatttatttattatagagatggagtctcactgtgttggccagggtggtcttgaactcctggcctcaagcaatccttccacctcagcctcccaaagtgctgggattacaggtgtgagctaccacacctggcagtaatagatgaatttacttgtacaacaaacacaaatttttgtgttgtgcggtttctcactagggccacggtcggcctctgggcagagatactattatgtggtgtgggattttcccacatggtaggacatttagcatcccccgtccctggggaactaaatgccagtagcccccaggagaatttgtgacatccagaaaatgcccccaggcatttccaaacaccttctgatgggtgagactgcccatttgagaatcactaggcagggaaaagtaaattccttcattttacttcaaatggggtgtgttagcatcatcttgcttgagcagctttaaaaaaatagtttctaattacgtacataacacattctctttgcaaacaaatcctatagataaagctgaagtctcctttgacgcccacttccagttctagtcactccccgcttctctgaggaagtgagagtaactgacatggtttctaccttcaagaccctttgctttatgtttatatacagatgtaggaacctgcatacaagtataacggagtgttgttggtgtgtgtttgtgctgtgtatttcatctgcaacttgaattttttactccacaatacctgttgaaggtctttccatgtccaaacacgtagaaatgcctcatcctacagccgagtaatatgtaatgactgcacagcattttatcatgttgatgggcctcttagcaaagagctgcaaaggaaatcaattccctggatgaggcgttgcctgtggtctggtcacaggaccaaattagacaaaagctgaggtcattttgaatcatcccctccaaccctgccgcagtccacagaacaaagcagtggcctgacttgaatttgaacatagtatctctaagcctgggtattctggcattgtgtaaacacagatctctgagcctactgcactgaaatggattcatttccttttttagcttctggcatggcatttttagttgataaattgtggttctaaggaagcaggtttgatgatcccctttgtccttcaaccaagtgtgtaaaggaggatgtttacttttatgggtaattacaggtctatgaattgagcacttaatatgaggcaccttcatcccttatctcaagtcctcacaacagtcctttgcaggaggtattagtagctcattttgcagggaagaaaactgagacttgcggagattacataatttgtctaaggcaaatcagttagtaagtgacacaaacccagggcttactctcagataataattatcactaatttatttatttattcaacaatattcattgaatgtctatcatgtgctggaaatggtacccagcactaagaatacatcagtaaacaaggtagtaaacaaagccaacaagcatatgaaaaaatgttcaacatcaccaatcattagataaatgcaaataaccacagtgagataccaccttgcaccatcagactggctattattaaaaagtctaaaaataacagatgctggtgaggttgcagagaaaagggaacacttatacactgctggtgggagtgtaaactagttcatctgctgtggaaagcagtttggtgatttcccagagaacttaaaacagaactgccactccacccagcaatcctattactatactcaaaaaaaatacccaaaggaatataaatcgttctgctgtaaagacacatggatgcatgtttatcgcagcaccattcacaatagcaaagacatgaatcaacctaaatgcccaccagtggtggaccggataaagaaaatgtggtacatagacaccatggaatactatgcagccataaaaagaatgagatcatgccctctgcagtaacatggatagagctggaggccattatcctaagcgaattcatgcaggaacagaaaaacaaatgctgcattttctcacttagaagtgggagctaaacattgagtacacatggacacaaagaggagaacaatagacaacagggtctacttgacagtggagggtaggagaagggtgagggtcaaaaaacttcctatcaggtactatgcttgttacttgggtgatgaaataatctacacaccaaacccctgtgacatgcaatttgcctatgtaacaaatctgcacattgtaccccctgaaccgaaaaagaaagttggaaagttggaagaaaaagaaaataaaacaaagatgagatctttgcccttctagattctagacctgacattctagtgggggacagaataggtaaacaaacaatcttttagggaacattaagtactatgaatgaacatcttttagggaacattaagtactatgaatgaccataaagcataataaagggacaatgagttgcagaagggcctttttagaaagggtgttggataagacctccctggagttgtgacattcaagcagagacctgaatgaagcaagagagtgggccatgccaaatctcaagtgaaccagtgttgcaggcagagatcagtaggtgcaaaggctctaaggcaggatattctggatatgttcaggaaacataaaaaggctgacaaggtcatattggagtcaccaaggcagagagagataggaggtaagatcagagaggaagccagacccagttcacttgaactgttctaggcctaacatgccactccaccagcaactccacgggttgattctgaatgtgataggaagcctttggagcattttgaacagaagagtagtatgatcttgtttaagtttttagagaatcatcctggctcctatgtggagaaatgttggtaggtggggaagagtagatttaaggacacaaagtaggagactactataaaaatccagggaagaggtcatagattggcccagagcagtaagctgtggagaaggtaagatggtaagaagtggttgaatttgtgtgtgtttcgaaggtagagctgataaagctttttgatgaattgaataacttttaaagaagaaaagcagttaaggatgattccaacctttttacctgggcgtctcactggaggtggtgccatttactgaaattagaaagcctggcgtggagtggcgagtggggaccaaattcgaggaggagtggggaatcaagaattctatttttgacatgttacaattgtgaggcctgttagacctgcagatagaagtgttgaatcagcaaatgaattcatcaagaaaagagtccgggctagagatactaatttgggagttgttgacgtcttgatgatctttacaggtgtgggatttaatgagcttaatgggaattaagtaaaactattttgcttattacttattatgggtaggtcacagcactttgtgcttggagtataccagcaagcaaggcagacacagtgattattctaagtggtttgctccgagccctgcatgccaccaggaatggtcttgacttttgttattgttaaacttattaaatgttggagtggacgcaaacttagagatgaccaagtacaaattccaaaacctctctcaaatttacaactgaggaaactgaggcatggagaagttaagtaatttgttaaaacctagtgtttaaaaaccatgtatactttagagttttcaataatattcagtccaaagcgttcatattcttcctttttatttgtatttttcttatagtctaagaaaggaagttaagttgaggggatagtaaaaaagataattagagactttgcctaaaagacctatgagagattcaattgaattcaataactaattattgaatgcctattgtgctagaaactatgggtataaagacgactaagaagacaattcctacaaggggagaaaattttgcaaatcacatttctgaaaagagacttgtatttagaatatataaaaactcttcaactcaataataaaaaagacagataactcaagtgaaaaattggcaaaagatctaaatagacatttctccaaagaaaatatacaagtggttggccgggcgtggtggctcacgcctgtaatcccagcactttgggaggccgaggcaggcagatcacgaggtcagcagatcaagaccatcctggctgacatggtgaaaccccatctctactaaaaatacaaaaaattagccgggtgtggtggcgggcacctgtggtcccagctacttgggaggctgaggcaggagaatgacatgaacccaggaggtggaggttgcagtgagctaagattgcgcaactgcactccagcctgggcgacagagcaagactctgtctccaaaaaagaaaagaaaagaaaaggaaaggaaaaaagaaaagaaaagaaaagaaaagaaaagaaaagaaaagaaaagaaaagaaagaaggaaagaaagaaagaaagaaagaaagaaagaaagaaagaaagaaagaaagagaaagaagaaagaaagaaagaaagagaaagatagacaagtggttaataagcgcatgaaaagatgttcaaataattaaccatcagggaaatacaaattaaaaccacagtaagataccacttcacatcctctatgatggctataataaaaaaagacagacagtagcaagtgctggtgaagatgtggagaaatcagagcccttctacattgctggtgggactgtaaaacagtacagctgcttgggaaacagtttggcagtttcctagaatgttaaacataaagttatcacatgactcagcaattccactcctaggtatatacccaagataaattaaaacatatgtctacacaaaaacttgtatacaatacacatgactgtatacaaatgctgttcataccagcattattcataatagccaaaaaagtagaaataaaccgaacgtccatcaactgataaatgggtaaacaaaatgtggtgtagccacaccatagatggtatccatatatacaatggaatattattcaggagaattgcctgggaagcaagttcagggtgagaatggagagccaagggcagaatcctgtgaagcaccaatactgaaaagacaagtagcaaaggaaggtctgtgaagaaaacagatggtcaggagtagaagattaagagaaagaagagttaatattatggaaaccaagggaaagtcttccaagaaggaactgcatagcagaggcaaatgctagagtgatgtcatcagtgaaaaccaagacacagccaccaaacacagtggacatccatgactgcaatctgaacacaccagctgtgaagacattgccagaataattgaggaaataggaatgtggaatgtgtgtataagatgatacgacagatttgttgttaattttcttggtttgatatgatactatgggtgtgtaggaagatgttcacttttttaaaaaaaagcatactgaattatttcagggtgaaacgttagaatgtctataatgaacaataatttagcagataaaatggatgaaacaaggcaaaatagtaacaatggggccgggtacggtggctcacgcctgtaatcccagcactttgagaggccaaggcaggtggatcacgagttcaggagatcgagactatcctggccaacatggtgaaaccctgtgtctactaaaaatacaaaaattggccaggcgtggtggtgcgtgcctatagtcccggctactcaggaggctgaggcaggagaatcgcttgaacccgggaggcagaggttgcagtgagccaaggtcacgccactgcactccagcctggcaagatggaagataccaggcaagctgggaccaacacagaaaatggaccaatatcttgagcaatctcaacagagccagtgagactctgtctcaaaaaaaaaaaaaaaaaaagtaacaatggttaaatctaagcaacaagtatatacgtttattaattatactattctctctagttttttgtccatttgaaaactttggaaaatctgaagcaatcaaccacacaaacaaaacctgtaaagaagccactggattaggcagttaggagaaccctgatgacacttgagaacatagctgcagttgagaagcgggtgccacacccagattgtaggggatttgaggtgaggctggagagtggacacaaaccctcgtgcaagaagtttagcccgaaataaaaaaactagagagggcaataaggtcccatgatcttttttttttttttttttttttaatgcacagatctgggtttgtgtacaggcagtgggaagaagccactaagaagctaaagatggaaggtgttgctgagagaaataatgattcagggagggagagaagaaaaattatgaacaagagctgaggaaggggagaggacaggtcttttaagctaggggtggaaggggattatttgatgtgaagaaaactgaatgagcacgaacaaacctgcaatgtcaatatatggagctgtgttccatctccattgagatcaaatgtctgcaagtctatatgtttatgacactgaatatatcatcagaaacaaagctgcaaagtatttcccatcagtttcatacattttgggcattgcatactgtattgtcaggattgatccaagagaacagcagccatgtggcttgctggatcggaggaagtttagggcaaggaagtgaatgaatggcaacaggaaagccatctggggtaaaagtggtaatccttccccactcagggaaaagatgggtgattcacagcaaccaagaccacgggagtattggttaaaccaacactccagtttactcttatgaaccacctcagaatcccttggggtttccattcaagggagcaggacagtagtatcatttggggacttccaagcatggtgttaggtcatgagagccagggaggtggggattgtcaacaagcagatacaaggacccttggaggttgggggaggagaaggactctgagcaaatgggatcaaacaggtagaatgtttctcccacaaattctcaaagagggtgactaaggctatcacagcatatatagtcttcccatccacacaggagctttgtttcctgatctataccagcagaggtacagatcaatccaggataattatcctcagcccctgttggttgaagataccaggcaagctgggaccgacacagaaaatggaccaatatcttgagcaatcttaacagagccaggaccaggcatggatcaaagtacaactctccttctggataaagaaatatccacaaaaatctgcttcgaacatcatatcatcttgagacagttccatggctcagattcgtgttgttttctcctttgtctttgtgccccagagacgtgttccattttgtaaatgacacggatgaggacaccattctcttgtcagtgattctcaaactttttcacccaagggcctctaacagtagaagagagaaaacattgatgctgggaattttgagggacttgcatctaatcaatatgtccaaagcacaaaatcgattccatgtctcctggttaccttaggaacccaggtgtactttgtattctagtaacagcaggacaggagacctccaactgtggtccactttggctatgttttagttggctgctgttttctgttgctgctgtagtaagtcaccgaaaacttggtggcttaacacacacagttatcttacagttccataggtcagaagtccatcatgggtcccactgggctaaaatcaaagtgtctacagctctgtgtttccttctggaggcttaggggagaatccctttccctacccttcccagcttctagagacggtcctgattccttggctcatggcttccttcctccatcttcttcttctatttatttatttattttgagacatggtcttgctctgtcacccagattggagtgcagtggaacaatcacaactcactacagcctcaacctccaaggctgaaatgatcctcttgcctcagcctcctgaataactgggaccacaggcacatgccaccacacctggctaattttttgtttttattttttgtagatgtggggtctcactgtgtttcccaggctgatctcaaactcctgggctcaagtgatcctcctgccttggcctccaaaagtgctgagattacaggcttgagccactgcacccagctcttccatcttcaaagccagcattgtgcatttctctgacctttcttcatagtcatgtctctctctcactaactacaattgggaaaggtcctctgcttttaaggactcaagattatattatgcttattcagatcttgcaggataatttccccacctcaaggtccataatcttaatcacatctgcaaagcctctcttgccatgtaaggtaacatattcacatgatcttggaattaggacctggacatctttgggggtccattattctgtctatcacagctgctattgcaagaagtcctgctgttaatcctagggaagaaattaaggaaattctcatcttcctgagaggggaggcaggcctatggtatttccagacacttcttgtcatctagagatctaagcttaactgtatattgctaagagtcatcaacctctctcacatgaactaccaagaacttttgcaaaagaagctggagaagactttgtgttgggataagttggaaaaatggggcacccactccagatagatgtatggcttaggaagaagctctagtggtttctgtgggaaagggaggcacagtgttcccagatggcagaactttttttttttttaatggctttgggagggttggtaaaggtcagtcctgtgacacagatatggaggagcaaccacagggctacccttggctatggctgcaagggcctggacagctgatgttggactacatgctgggaacaggtgagctctggcccatggtggtgtatacatgggggcatgaagaaatgagggcttctgctcggcctgcagctcattctctcctagacttttcttttctcaacccatctatttgcatgtgagattcatagtgcttctgctaattcaactttgaccctattttatgtaaactaattatcctggccttactatgcaaggacagtattctcccatctctttcctgggttccatctcttagcttccctgtgttggcatattacttctccctgagctcagaaaggctgcttatggttgtggtgcatgggtgtgtgtgtgggtgtgtcttggggtgggaggtgggaggctggtagtgcttaacctacgataggttccaatgctagtttccttcccatccctcccttgcccattctaacagcttagttttcccccaggccctcacccaccaaatcattgtgacaactgaagacacccccatggatttcccaaagacctcccgggggacaaggccacccccactgagaatgtctgctcagaagggtatgagtggaaggcaatgtctgttcccggcagggcttcgggggcagtttctggcttacagaggctgaagaaatttcctggaataatacctactgggctccactgctctaaatagtggctgtgatttcttaccagttaaagcaatcacctctctctgaagctcctgttgtttaacctttggccatgatatatccaaggtggggctcacctcagagagtctccaccctggctgcacgttgaaatcacagggtacctttaaaaaatactgatacccaggtgtcaccccagacagtctgattaaacaggcctggtcctctagctattttaacactcctggtgattagccagagctgataacctgttattaggggattttctctgtgaataaccttgacgctggagtgaggaagggcttagcagcattgaaataaacgcttcccattggctggagaaatttcctcgtgagccactcctcctttaatttatcccaccctttctcctttcctcccttctacccatttttgttataattatttagaattaatcatacagttccctttcattcatccaagctattactctgttgcaacaaaggtcaggatgaaaagggcagcgcggttggcagctccatatttttacttcctcttggtgtaaagttttactgaataaagggagtgctacagtgagacgctcagacgaggggtaaataggaaatgagccagtgcccagctgggctcagcctggtccactccacattgccagccatcagactttctagaaaacacaggctgaaggcacccctgctgcctctcaaactctccgaggttttttgttttgttttttgtgtgtgtgtgtgtgtgtgtgtgtgtgtgtgtggtgcaatgctcacacatgaagaaggccaaacctcaagctttcttcacgtacctgtacatttcagtctctgaaagaaagcactgtctactacgaatgttttattctgccatctgcctggtggaaattactgagggaaacagctggttcagcacttccgccactagcttttataaaggaagaaccaaagaactgttcctcatcagttgtgaagcctaggtttcagaatgcactgcttttatattctcatgaaaattaccaaagcatattcaagttagttgtcactgtttcaaacgccacacagttgatgagttacatatgcgtgggctgcatggcatttctgcagtcatgggaattgtagttgtgcatcttagactctatgctcctagtgttagggttacagacaaaatgtgagtagagaaattgtctctactttcaaaggtggtggggtgatgtgcttcttggtttaaaaaattaaaagtataatttgtggccagaggagcaatagtttatggctcatttgaacctgatctgaattcattaagacagtcttgacttgactggacaagacataatttgatctgagtatatatagagccatagaggcatgtacacatatatttctataatatatagtctcttagcatatgtttaacctaaggaaggaccacgctgtgtaaaatacattatacacgggcctgtttggtttcagactccttcctcacccttcacctactctgctctttgtcttaccagtgcccacttttgcaaacagatttctctggctgccaggtcacctaggctccggctgggctcagccaatgagaaacactggaaggcaggaggaaggaaaagaccagggtttctctccctaagcctctcagatgtggatggtgcgtctgacagtagcagaggcctggctccagttcctgccagaaaggctgccatggttgtggctgttctcagtgaccctagtccctggacattggtaacaccatctcctccaatggttccttcagtccaggattgggagtgacttcctgctgtcactattcttagcttctcagattctctgtcacctgtgtaaccaagtctctatattatattccttctgttataaatacatgtaatggtttctcttgttctgattagaccctgactgatacatatgtcatggttaaaacacattttcctttaacatagattacccattagtagattatttaattacagttgtggttgccaatctattattatttgtaattatttgtttgaagggtagttcttaatctattgaagttatttgtatttgcccataacattttaaaatgcttaaatatcataaatgcttgtgaattccaccatcttgagcttcaaaggagtggcctaattttactatatatggtcatatggtaaatgtaatggaaatgataaatcataagcccgtgaataattgttattcataatggaactgctactgtattttgtagaaatagcccacatctattcttgagctaatatacatgctgatttccagcaatagtgccatggaggaattatccagtagtagttacagtaaaagaaatgctcataatagctttggaacttggaagtaattatatcttcctctttaagtgatttatttttatcattacttgcagtgtctttcctgaaccttagcctaaaatcctctctcctgctgactgcaaatttagatccttccaggaggggaatgcattagtagaatatcgtcaaagggccctcaactaaagcaagtcaatgtggctaccatttcctttcttccctccttttctcgtcttactcaagcttaaaggactgtacaagtgtaagtaaagcacataaacgagctaggatttcaaacatggaacctggcactgtatctgtcaagagccaatgagtatctgattaaagatggcagataagcacacttgatttatcctcaccaagaccccactaaaatgatagtaatggcatttaaaaagtgataatcaccatagtaatggtaaagggactcccggcagagaagcaattttacagaatttctggagggtaaacagtggatggagaagtggaggtagaagaaagataaaggaagccaaacctatattacaagagtaagggtgggggaggctagaactgaggaggaaatctttgcaatgcaaaatctaagagactaggcaactcataaacatcagctgagagagtgatggggctgaaatcaccatgattcatgaaataccccaaaggagcacttagcctttcaccccacttggcagccagacaggccctcctctaccttttctccctcactccactaaaaatctgacagacttgctcttctctctaaaaatgaggtggccccaaaaatgaaactcctgatatcctgacatttaggaattccctagctaaatagctgagtccctaccaagtaattataatgcaagtaatagaagcagcaaatagttataaaacactgcaattagtacattatatattaattcatttaatattcacaactctaggaagaaactaaagcacagagtgctgtttgagatcatgcagcagttaaccgctaaatcaccacaaggttaaatcaccactagtaagctcattccaggtgcaaaaaacaagcaaacaaacaaacaaaaaaccccaaagccaattagcaccttattgtctcattctgaattaaagacaactgaggatgatcagatacttgaagaaagaatacaacacgatacaaaaattagctgggtgtagtggtgcagatctgtaatcccagcaacttgagaggctgaggcacaagaatcacttgaacctgggaggcagaggttgaagtgagctgagatcatgccactgcactccagcctgggcaacagagtgagactctgtctcaaaaaaataaataaaaatacatcacgaaagacagataaaaataaaaacaagaatggcccaagaaaagagtaaagatgagaaacagaagggaagaaagaaacccccagttggcacccctgagaaatttgatgagatattgcatcataaaagaacaggatgcaatgaaaaaagaaaaatcagagcattgttagaagcccttggatatttaaaacatttacaaaaatatctctatatatttttaaacaaaagcattagaatataaattcaaagaaatctcccaaagaggacaaaaagatagaaatcataaaacgaaagagtcttagagggctaatccaggatgctccacagctgactaatagtagtgacagtaagagaaaatgcatattgagaaatagaagacatttcctagagctgaaggacatgagtccattagacatagaatcattacgtttacacatcggggataagaaaagatcctctatgacatttgtagtctgtgttgtgactaaaatgaagtcttttgtgctttctttataggtttagtctaggagttgaaaatgagtaacagggcttacattatggtgaccatgaaaaatattgtaggtttagtaaccactctgattatatttcttttcttgtatagtcttttggtttttttcactggagtttgtatttgcctttctgagcatctttgtcatcattttatccctcaagtttattcagtctccttatgtaatcagtaattctatcaaatcctcttctttgctcctgagacctcacctacttcaatttggacgtcttgctctctgggtcttcactggattaaattgcttggagtctacattttgttctttctggtcttaattccttggtttgctgaaacagatcctcaggtaacttctttagaaaggatgtataggtgatcaattttctttgacatcatatttaattatcacctttaattgatatatgagtcaaaagtgtatttttagtttgaaaattgtttttttcttgaaacatggaaaaattgttccaatgccttctagcatcaagtgttgctaagaaaagttctgataaaattcaaattttcattctgttggtaagaacattcctttcctctactctcactctcttaaaatgaatacagcatgcgctagcaatataagcatattgcttaaagatatggagatgtctaccagaagaaatgtctaaaaaggtaagaaacgattgcctttgtacagtagtactggagaagacagttcaccattgctttatttattttttcttaacaatgtgcattattattttgaaaaaaatttatattataaaacgtgggttgctaaactataaagaaaagccagtgaaagattatcacacagggtagggttgtgttatctctaggtcagggaggtggttgtgctcagaactcagaaaggaatgctaggggctcctagagaactgacattactgttatttgacttgagaagtaattgaccagttgcttgcttcatacttatcctttaaatggtacaaccatgttttatgaatgctcctaatatacaattcacaatttttaaaaagaggcatatgacatacattcattccaaatgccaatgtaaatgtctggtccaagtcagcttagcaaaataaaaattgtcttgcaaagataaaattatcaatacttttctttaatagtacaaaaacatatatcagaccaggcatggtggagagaaagttccctccctaggactttgggaggctgaggcaggaagattgcttgaggccaggggttcatgaccagacagatcctatctgggcaacatagtgaccctgtcactacaaaaaaaaatttttaaagccaggcacagtggcacatgcctgtagtcctagttacgtgggagactgaggcaggaggattacttgagcctgggagttagctgtaatcattccactgcactccagcctgggtaacagagcaagactctgtctcttaaaaaaaaaaaaaaaaaaaaagtattgtcattaattttcccttttcgcttttctcagattcaatattataggttgaaaatgttaaatattaagtgcaatcgtgatctaacaattcatttatagatgagttaagcttatatttttgaggggtttttaaatcccatgggagaggaagataccatttgaacctcaggttgttggagatttcaatacaaagataaagtcttgtttttgtaaggttttgtttctagaggtttacttctcattatttaattcagttccatattgactgagtacttgagacctaccaagaattcatttacccaataaatatgccaggcatggttttggcctaatgctgcagacaaagtccttgctctcaccaagcttacactctaggggagcaggggaggcagatagtcagcaattcaataaataatttttttatatatcaagtgataaagaaaaatagagcagaaaaagaagctagagtggagagagtgggctgctatttcatgcagaaacccaaatgaagtgagagagggagacgtgtggctatctgggatgtataatcccagcacctgcctccttctggggttacacaaataaatatgtctgtgtcctcaaggtatgtatagactatgaaagaacccatgataatctgaactctcagaatcagaatgttgtagaaggggtaagattcagagtatgtttagagtgaagatatacagatggagggaaggtcaatgggagggcttcaagtttaagagagagatgagtaagcaggcaagaacagatgaagcatttcataaagggaaagccagctagggttggctcaaggaatagctaggaaaatggggtgatgatggtatacatgggtgaagggaactgggggagaacttaaagcaaaatgaattataggcataatacatgacaaatggggtaagccagagagtggacgagagggatggatgatctttgccacaaagcagctctctaggcagagtagagagtgaagcctgtattttccccagatgaaggagtggccccgctgagctgggccactacatgctgcagccataaaagccatatctctgatcacagcgaactcacaggccagtgagcccagatatcaagcatgcacagacaaaggaaacctgaagacactcgactgcaaaattgaaggtaacataagaacccccaaataagactaagctgccttcagtcttagtagtactagtttgcatgccaaacaaatgaacaaacaaaccaacaaaccctgacctccccttcccccatccccaaaccttgaaaagtagcagagtatgtgcagaccatgatgaaggagtttcagggcataatgcacagcaaaacttcctccagacagacaagagtcccttcgtcccaaatccctcagttcaccaggggtgtttaagcccagaggctctctcttttctcctccccatcaatctctctgtctctgtcaccttcaccatttctcttctaccgcctcctctttctttctctccaaaccaagccctcagacctcaacccaaccctctcttctttccatgagttctggcccttccccctgagggtgatgcccctttttcatctttccccttttgcatcacttacccccaagcttcctccaacccacacctcttagaaagtagagaaaagtaaagaattctaaaatttctcattgaatgtcttcactcttgttactaaccaaaaagcaaaagacattagaactcatggaagaaaattgagaatcaattacctaccaatacaatagatatttcagttttccagagggaaagggcattgggaaggggggaaggggagaagggggaagaaggaaagagagaacaatggctccactatcatttgtatgtatgtatgtttctcccatggattatggaccatgccacacattgctgaagcctgtatcttccacagcgccttagcaggtagaaatacttgaatgaatgagtgaatgaataaatggacacatgagcatagcaaatgaggcattgagtgcagtgagattgctcctagctgtctgatgacagtcctggttcactgttactcactgtagatggagacagcttcttggaagctatcctggactccagcagttatctccaggaacactctagttgttcctccggcaagtgtggtcttgcagaacaacatgatcatcagctaactgctgcaggaattcataagccaccttatgaagtcaacacttgggtatctggtcttatcccaaaatttcttcaactcaggccctcttggttggacttgttgatttcgtaagtcaataatcccttcacactcttacaaatagtgtggattaagtggtatcaaggtataatctctttcaaagttctgtgcacaatacacacaatgcttgtatctcaaagttaacttttaaaaaataccataaacgttattacaaggaaatcattactaacctacaaaacccttaacactcagtatatcccacgtgagctgcctgctaatcctctttaaaccctgctctcagcatggaattcctgagctgaaaacccagctgcccagtgtctgaaaaactctatacagcattgaaagctggtcccactttccaggccacactccatgcattccccattgcttccaacatgctgcctcgcaatcaggtggtggccattctcatctctgtccctttgtccagccagcttcttcttccctggagtttctctctctttcccctcctctctctcccagctgactgaaatggagaaattggatgggcaaaagtttcctcctagaagctctcttccagggagccttcctgactggtccagtccttgtagctttctgggctccctacatcctcccttgctcatggtcagcacagccccacctcgggattcatcggcatatctctccaggcaggcagtaccttcctcctggaagtacccatatcttttacttctctctgtctctcagaatacttaacacattgctttttgcataatggctattactgcaaaactctgattgagtcagaggaactaaatccatttgtttaaggacttgcagttcatcctgttgttcctcaggtgatgggcactgggagaatgatgggcactgggagaatgataggcgtaaccaagatggagggtctaggcctaattccaggcctctttctcacgattcttcttgaagatcctgttttcatcttatttttaggatgggtagtggagcacatggcaagatcctaagaagtcatgtttccactaaattaatatatgcacacattgttataaactaagctatacatgcttagtttatattctcttagaatttctaagaggtaaagattacaatgagaggaaggagagttgaggaagctctcctcaaagtacaagcactcctctctttccagggaatctcatagattacattatagagataaatgtgggtaacaggtaagaatgctgtgtaatagcaatacccagaggcaaagaatgtcacattcctgtacttctctaaaatcagattaaacttggctacaaggtccttactctccaaggttgggaaatagtctaatatcctgattactgggtcttcctgacccctccatgggcatgtacaggagccctagtctttcacatgcccagagaaatggggatatcctgattcatagaccgtggtggttgtcgtggtaaccgctactcctgctactccatgttctagtcttttctgctagttggaccctctagggggccatggaaaggcgtcttggtgctgtgcttgtctcccctggccacaggttatccatggagagccctactccggctctcaaagtcagagcgtacagtgtgcagcctccacaggctttccagtagctcccacctgagttcacacagcaggggtgggatgtagatccctgccaccctgtaaatctctagcccaaacacccacctcccacacagacttcccatcttaggggggtcaccagtagggctggaccatcctctcctcctttagccacagcaactgtctccaccatcctgaataattcttcttaatcagtctggatttcaaacaaagatctgagtggaggggctttatcctgggagcccaaaaacttctctgttttaggctccaaagcacaaagggctatttctttccccctgaggaaggagagccagcccaagacacaaaattcaaagctaagaagaaattcccttatcatgcttttttgctggtaaggccgcagcagtaaaaaggacaccaattaacttctctgccactctgtttcatgggtgaacactcagcctataggtgtgtgtttgtgtgtgtgtggtggagtgggggttgtgtggccaagtgcattaacaaaggcgatgtggagccctgatgaaatctcaaagggcagttctgaaagaggagccatggaaagaaagcattaactgtagcagatgctgctgtgccctgggaccatgggaagtgaggaaatggcaatttgttaggatttcctgcacagcagttggactagggctggagtaaggaataggactgctcatacagtggcccaggggtgagaagacagacggctcttccctcgcccagccttgcatcctggcatggggctacacttcaagggacaccttttctcactcatacaaaagtgttacagggctgctgcggctctgtttaggaaagacagtagggtaagaaaatatgccaggttcaggggaagcctcggtatttggtcgaccataaagactgacacaattctgtactacatctaaccttacatgaaagcctcaccaagcatcagggaaacaaaacacattgacacaaccaaataccaatcaagggaagccagggatggggaaaccaaggcagagcagcatctcgtccccctccctgctctcctcatcgagttggtcaattggtcaagtgctctggctgtatcagtccaggcaaatatgggcaattcttaaattctcacttaaagtgttagaggagagcttttaaagatgattgttcctgctaggcttccttatttgttattgcaaacaactgggaaattatcttaataagcgtattctatataagtgtcttagaatggagaaattggggaaaaaagatttaagatttccttcattaatcatcaagaatgactttttttaaaagttcacttgggaactataaatgtaatatctgttcattgcagaaaataattagatcactaccaaattgctgtcttcaaaattatgtataatatatgttataaattatatagaaccaatttgttttctcattactactatttgtgtttgatcttttctccatacacttgaccattaggcatattcttaatcttttccatgtttgccaatgcgacaggcaaatgaccctccttgtgttggtctccatttccctgacgctagtgatattgaacatgttttatatactatttgtcattggtactttttctatgacttacttttttttctctgccctctttcttgtgtgttgtttgttctattagcactgatattaatcctttattattctcctgaaaatattttctcaaagtatgtcatttgtctttcaacagtgtttatggtgtctttagccaaacagggtttttatgcaaagaaatctatcaatgacttactttatggtatttggagttttgtgacttattcaggaaggcaccctccattataaaaatattcttttatttttccatttggtatttttgtcatcttttgttttttgttttgttttgtttgtttgttcatttgtttgtttgtttcgagatgaagtctcgctctgttgcccaggcttgagtgcagtggcgcaatctcggctcactgcaagttccggctccggggttcaagcgattctcctgcctcggcctcctgagtagctgggactacaggcacccgccaccacgccctgctaatttttgtcttgaactcctgagctcaggtgatctgcccacctcagcctcccaaagtgctgggattacagcatgaaccactgcgcctggctatttttgtggtctttaaaaaagtttgtatcatcaacttagcttttatttatttgttgtataatgcagaggtaagacccttaattaacaccacctaaccacattttatatgcattgtagagaaaaaaggaacctaagctcttttattcatctgagagaccgtggtgagaactctgtgagagaggaaaagatgtttcccaataaagatcatacactctagtgggaaggctattatggtagccacataatccaaattttctaaagtagtcctggtttgtaatattctttcttactgacacagtattagcaccaacttctgattcagaaactgtggtcatatagccaatcagcctatgaaagaggacaaggtaagcgccacaggaagtctgttgaattctactaattcagaggtgcaaggggcatttctgcctggctttccaggcagaaatattagggagaacatttgaattgaacctcagaggcaagttaaattttgatagaccaagatggtgggagggatcctgccaggcccagggaacaaaggagcaaaggcagagaagcagtgaagcacaggttgtgtgtctggaagccttgcgatctgtccaattgtctgccatatagggaagtcaggaggatttaaattagatgatagtttgaggccagagggtggaaaactttgaaagtcaaggaaatgaatttgtgctttattttctagataatagatcaccactgaaatgttcttttaaaaatggctttattatgatatgattcacacatcattcaattcacctatttaaagtgtaaaatgcacccttttaaagtgtataattcaaatttttttagtatagtcacagacaaatgcaaccatcaacatagtcacttttaggaaattttcatcacttcaaaaagaaaccttgtaccctttggctgtcacctccctaagcccctatctccatcccagccctaagcaaccactaatctattttctgtccctatagatttccctgttctggacattttatatgcatgaaaacatagaatttgtggtcttttgtcagtggcttctttgatttggcacaatactaccactaaaggcttgaactacagaattctctaaccaaactggctctttagagagaagggactggattcaggatggtggattggggctgggcgaccaaggagagccattaggaggccagtgagtagctgttatgtggtcatatgagtgctcagtaaggaagattttggctgcaagtaaggaacactgaactacaaatggcataaatgacaaagacatattatcttactaacaggaaatctggaagtaggtggttctcgagttggcccaggacttaccagtgttgccaaggacccagctcttccacctttctcttcaccatcttaatgtactggtttttacactctgaccttccccctcattgttggaagatgctgctgctcttcaaggaatcacctcttcatacaattgcctacagaaacctgaatctctggcttttaaggaaagaaactttttcccagtgctctacccaagaaacttcccttcatgtgccattggccaggatcatgccacacatccatgccttagttgcgaggtaggctgagcatgtgcctatctgccattgtcagcccctatggtgggtggtgagctgtgcccagcaagaaggaaggaagaggtagtggcaattgtgtaggctaacaacagtgtttgccacaagagacaaagaagatccaggatagtagagcattcttagtccagcaaaggacagtattttttgaagataagaatgtggtcaaatggcacagtgaagataagaaaaacagtaatcaataaaaagataatgggccaggtgcagtggctcatgcctgtaatcccagcactttgggaggccaacgcaggaggatcacttgagcccaggagttcgagactggcctggacaacacagcaagacctcatctctacaaaaagttaaaaaattagccaggcatggtggtccatgcctgtggttccagctactcaggaggctgaggtgggaggattgcttgagccctgaaggttgaggttggagtgagccatgatcacaccactgcactccagcctgggcaacagagcaagaccctgtctcataaacaaaaacaacaaaatttttttgagttgtcttagtttttcttataaatttgtcataagatgaagttttaaaacctcatattcaatagaaaaccaacagtgcttcctataaagtgcccataataataaatacaaaaacaacaaaagaatcttactaatttctagttagacagcatagcctacagaagactctaatcctgaaccaagctctctacaaaagggtgagatcccaagtgtcaaagaggcattaaacacatgcaccacacaattcagtgtcctctaatgtctgtcatagaccatcttagctctgggaccccacagtgctgcttataatctgtgctgttgactctaactcctgtatgacaagcaaagtcaaaagaatcccctgtgtgccttgatgcttgtttcggcgtgtgcctggagtgagggatgaacgtcttaagctttgccatcagaaattgccatttttgtacatcaaaaagggtctacaattgtcatttctaatacagttcggcctaatcaaccaccaaagatgttaacattgattctggggaggcatgaggggatggaaaatcttttaattatattttattatattactcttatttatgaacatgtattatttttgaatcattaacaattctaatttttaaaaagtaaggaacaaaaagagagtgcttagtctgagctgtcaaaagctgtgaataagctgtaagtccctgggcaggtcccgtcatttttctagtctaggatttcttcacctcggcactatcgacttactggaccagatagttgtgttggggtcggggggctgtcctgtgtattataggatgtttggcagcatccctggcttctacccactgttgacggtattacccccaaaatgacaataaaaaagtctccagatgttgccaaacgttttccagggggcaaacgcacccctggttgagaatcactgctcttgtcctcagtttctcatcaataaaaggaagcacagaaccaagtgctttaagctcacctaaagcaccaaattctctgactccgtcaatgtcaaatctgtaaatttgttttccagaagctattttcctccagagccactagaggggacactctgctacacaaaggacaaaaacagagcactcagggaactttgttttcctctcctcttgactttgtttctgtttctgaccgccccagccttaaataaatagtctttgatgttgagtgtgataaccccttaccacgaagcatgaagagttgtttgtcttgtgcctggtgccataaaagtcagtgtttttagatatggcggggaggggagggcaaaatattctctgctttttaaacattctttgtaaggtagtcagatgaatcatgcctctaaaaaaagatgtgcatttccataagcggagcctgcaggacaaccaggctgggaggtggaaaatctagttctgttcctggtcctgccacttctgggctgtgtgatgttggccaaatttcttgacttctctggttttatatagataacagaactgaggaagctgaggctgagaagttaaggtcacacagtatgttaagtggtcaagcaaggacttgcgtctgacccatcaacttcatagaatagttgtgaaaaccagaagagatggagaaagtgaaagagtcttgaaaaatagaaaaccccacaacaagttcaaggtgtgaatgtgtagatattgtgggaatgagagaaggggatggctatggggtagcatgagggagcagggtaggtccagacagcaaacagaagttactccttctccaagtgttgtaaattacaggaaagagcctcagtgcccccaaatacttcactactgatggagcttcatccctaggacttaaggtctccatccctataaaagtggacagatcactaagaggagtttactttatgctctgatgagttgtttatacacctcagcgaaagtgagggatctacaacactggtttttaaacatttttttaaaaccctgaaccacaatagaaaatatgtttcacagagagacccagctcacatacatattataaaatcgaaacgaaagtgttagttataatgtacttggatcttttctattgttttattttattctatcacttgcaacccatgctgacccactaaataatgagtcctgacctgcacttgaaggtattatactagaaggttttgtggaggggaaagagtttagggtcctggagctggtctagggaggaaacagatgtgtcctccgaacagtattcaaggatccctaaagatgaactttttacaagttttatagttttccaagggctgattctctgaggcgtgattcaggaggaagaaaagagaacaataattccaaatttgaattcccaaaattcacccaaatgagtgaggatgggccattgggtagcaacctctagactggattctcagaggttatgatctaaaccccccacatcattaacataaaatagataacataaaatatagatagcataaaatgaccaccagcacaaaaaacatttttaatccaacatttattgagccattattatatatcagacattgcactaagcactttacatgagtgataggacataaattaagtttaagtgttccctgattttcttctcttcctgcccactaacaagagttctggctttgtttgtccaatttctttttctgccccaacagaagaagaactggacagaagcggaaggaccagaggaaggctgattaggactggagaaaagatttcagggagtttgggagaaagaaagggaggcagaagctatggggtgtaagaggcttggataggaggggaaaaggatgctgaggggaattgaaggggctctttgtgatgtttgagaaatgcaagtattaatatgagttaattagaaattacttttggtgactagactgggtttcttgggctgcaaccctgccccccaccccaagactgcaccctgtaggtcatggtctgaatagggttacatatgcattatcttatttaatctgcataacaaacccatgaggtggtattagtatttcctttttctcagatgaagaaaaagaacttgatacagtctaagtaaccttacattacatgcagctaataaatagtgaaaccaggactgggacttaagacttttgatcatgaaagcacaagctcttaagtccgtgagcatagatgattcccagtataaacaataccagttaataaaatactcgagaataaatttaacaaaagaattgcaagacttgtacactgaaaacaacaaaacattgctgaaataaatcaaagatctaaataaatgagaaggtttcctaggtttatgaatcagatgactgaatattgctaatatgggattactcccaaaattgatctgcaggtaccatttaacatctatcaaaaccccagctgtattttttgcagaaattgagaagctgatcctaaaaatcatatggcaatgcaagggatccagaatagccaaacgattttgaaagagaacaaagttggtggactcacacttcctaatttccaaacataatatgaagctatagtaatcaaaacagtgtggtactgacatgacaatagatatctaaatcaatggaatagaattaagagtccaagaataaatattaatatttatggtcagttgatttttgacaaaggggccaagacaattcaatagagggaaaaataaataaactctttattttagaatagttttttaaataaactctttattttagaatagttttatatgtacagaattattgtaagaataatcttttcaacaaatagttatgggacaaccagatagccacatgaaaagaatgaatgtggatccctacctcacaccataggcaaaattaacttaaagtgtatcatagatctaaatgtaagaactaaaactataaaactctcagaagaaaactcaggtgtaaatcttcatgaccttgggttagataatgttttctcaaatatgatgccaaaagtacaagtgatgaaagagaagattgataagttggactttatcaaaattaaaaacttttatgcttcaaataacaccaaccagaaaagaaatgacaaccatagacagggagataatattgtaaaatatatatctggtaagggacttttgtctggggtatataaagaatccctaaaactcaaaaatttaaaaaaaaaaattaggccgagtgtggtggctcacgcctgtaatcccagcactttgggaggctgaggcaggcagatcacctgaggtcgggagttcaagaccagttggacttcatcaaaattaaaaatttttatgcttcaaataacaccaaccagaaatgaaatgacaaccatagacagggagataatattgtaaaatatatctgataagggacttgtgtctgggatatataaagaatccctaaaactgaaaactttaaaaaaaaaattttagtccaggtggctcacacctgtaatcccagcactttgggaggctgaggcagggagatcacctgaggtcgggagttcaagaccagcctgaccaacatagagaaactccatctctactaaaaatacaaaataagccaggtgtggtggcacatgcctgtaatcccagctactcgggaggctgaggcaggagaatcgcttgaacccgggaggtggaagttgtggtgagctgagattgtgccattgcactccagctgaggcaataagagggaaactacatctaaaaaaaaaaaaaaaaaaaaaaaaaaagcccaatttgaaagataaaggatttgaatagacagttctccaaagaagatatacaagtgaccaataagctcctgaaaacacactcaacatcattagtcatttgttaaatgcagttcaaaatcacaatgagatatcacattgtacccactaggatggctataataaaaaagacaggcaataacagcattggtgaggatgtggggaaatcagaaccctcataaattgctagtgagaatgtaaaatgatgcagcactttggaaaacagtttgatagtttctcaaaatgttaaacatagtacgatatcactcagcaatcccactcttttgtgtctacccaagagacatgaatgcatgtccacaaaaaaaaaacttgcacatgaatgttcatagcaacattattcataacagccaaaaagtgaaaacaactcaagtgttcatcaactgagatttggataaacaaaatgttgtatacccacacagtggaatattatttgggcataaaaaggaaagaagtactaaagtattctatgccttagttcatttgctgttgcttaaacagaacacttgaacctgggtaatttataaagaaaagaaattcacttcttacagttatgaaggctgagaagtccaaagtctagggatcacatctggtgaggaccttcttgctggtgcggactctctgccaagtcccaaggtgacacaggacattacatggcaaggtggctgagagtgctagctcaggtccctcttcctcttcttataaagccacaagtctctctcttgtgataacccattaatccattaaccaattaatccattaatccatgagtggattaaccacctctgaaagaccccacctctcagtactgccatattggagattaaatttcaacatgagttttggagaggacaaatatttgaaccatatattgtatgattccatttgtagaaaatgtccagaagaggaaaatctatagagacagaaactagatgagtggtcatctagggctggtaggtggggacaaatgaagaatgatacctaataagcatggtgttttttggggtggtgacaaaaagtgttaaaaaaaaatagattacaaattacataattctgtaaatacactaaaacccattgaattgtacactttaagtgagtgaactttctgatatgtaaattataccttaataattttttttaaagagagggaataaaatgagagaaatctaagtcaacaagtatagacaagtcttccaaggaattccttgcattcataaaggtttggttttaattaccagcatttaactgcatttgttgtagcaaaggaggaggatgctccacttcacgtagagaccagggaagtgccattgtacttacttctctgtatctccaagtggatatttttcccagttctctgattttattttcactgttagtatcaaccccagagcatataacccaagaatctgtgtctcacttaagcttactgatcatttctgcttcttttctttatttttctgttcacattatcctgataggatgcagggtgaagaaataatcagcctctgttcatcttattagagaaataaatacctgtgtatatgaagcaagcaaggccactgagtctttggggaaacagagcagggaggtgcccagaggcattttctgcagagaaggaagaaaagaataaacaagtcttctgccaaaaatgcctggaacttaaagcgatttcctcagcccaagatcaggctgtgtgcagacactgacagtgaacctgatcagttgctgctgctcccttgattaaaagcatgtagctttctctcttgtgaaattcacctctataaattccacctgcctagggattcaaactacatggaacaagtgcaattcctcagagtggcaactggcagagctcccaggaacaaggtagaactacacaatgtcccaggcatcagaggcatagattgcctgagtcagggagagtggtctctgtgacctgacaccccacccacagtgggaaggaaagctgtgggtgtgttatcaaggaggcctccacaaggggctggaaattcctggttttgtcttcctcttggaatgagacatttactctaagagaatcatggaaaagtacaaaccacagaatcataaaccacagagggagaagctacctcgtaggtcattcttatgctgggcccagataccccgataagcagatgttctcttctcaccacccctcctcgcctttgcttgcccacagccattgccaggactcttcctcaggcccagaaaggcagctgattcctggtaggagggcgctaagagtagaaagtaactaccattgtcaggtccagatctgttcccaatcccttctcactcctcctgcactctaaaaccacaccacagttccaactctttctgagtctggaatctttgagagtgccgtcatgtccttcttcctgtagccttcttgtccaccccagatggactgaccctcccacctacatccatgaggccagaaggcaacaaagacaagcgtggactctggctcccgccgaggtactctgtaccccgtggctctcggattttgcatctaccacatgccacaggcttgcgtccatccgacctccctagtttctcatccccacttgaacctgatgactgattcgccctcctggctacgctgagtaagccacccacttgccaaacctcagacctggtgttgacgcagtaagaaggcatgaggcccatgttgccagaacattcctaattgtttcattgtttccttgtaggatgtggtttcaagtcccatctttgtctcttttctcctggccaggttgcccttggtcaatattccttcattcactccagccactcagcaccgtgattaagaaaacaggatgtgagattagatgatccaggctctgccatgaactaactagctgtgaggctttagagaagtgtcttaacctctctgagcatccatttctttctctatagcattaggaatattaatagtacctacctcacagcttttttgttgtgataataccaataaatgaaataatcttcataaagcacagaggcttgaatgttcactctaagtatttaatatgtgtcctctactattttattttacaattatcattccttaattcatcatataattaccaagcctcatgccaggcactgagatataaatatcccctttaaagagtggtcatgtcttaaatccaggaagagctagttcatgttggcacccagggtagggagcgaagcccagggccacagcacagaggcagaggagaatagacactgaccaccaggagctgcccggggatggtgacaaaagtgccttccacctttccgcatctctttcaataccactgcaactccttgagtaaggtgggcaccacacagaagaagggggatggcagaggggcagtgagaggtccccagggaaacaccctcttcttcttccctgcttctctgacagagcacggccatgcctctgccatgcaggagggtgatgtcctttggggaggccttgttgaatctgtctggggctgttccggaagtaggaagggcggctgggggtggggagacggcaggaatgttctcctggcctgctggtctgtgccggcgagtgtgctgagaggagggcctctggacatcaaaggttccttttgtccccttccgagtggcagggcagcccggcccgggctgctggcgatgactcaggcctggccctgacgtcacccacgcccggccactggcctccctctgaagccaggaaactagttggggagtggcactcgcagctgcagcaaatctcaaaataaagaggcaacggcctttctcttcctctccatctccctatagcacaccttttatttcttttcttcttttttttaagcctcacgaaagattttacttgtagatcaactttcaaaatgtaggaagtcagaatgggtgacatcatcagaaaaatatgtggagctgatcacaagaagtgaagaacccagagcacgaaagcggttgtgactcctgggcccagggagttgacagcgtctgggcttcagaggagccagcgcctccgagtaagtgaaggcccacttttggccccccctcactcagcgcccttcaccgtagggcgccatcttgttccctgacgcctacagcttgccaagccccagcccagagttgggagtagggactgcatttgggagaccctctaaatacggccccaaagggatctgatatctctctccacaggatcagaaaagaatgcaaaaaaaaaaaaaaaaaaacaatactaagacggaaaccctggggagaacagcccaactgatgcctttccctgtcaaccctcttgttttgcctcctcttcctcccctcacctgagtattccgtttcaggctgtcagaatgtttgttcagagttctggattgtttgcttcctagatcttatactgagcgatcagacataaaaataaaccctgttctaggcaaatacgtgtcctgtgccatcaaatggtattttcacacttaacctggtaaaatatgacagccctggtaaaaagatgtacataattgtgctgcctttactgagcacgtttctgattgttctgtgtatgaacctccattatcttatcgccctgtttacagaggacttattttcattcctacttgtgccatcgtatctgggatgatattaagcacaaagacacaatgtgtctgttttaactttgtctaaaaactcatagttctttacaaagcctataatttcacgacctctggaagttcctacccaagaaagttaagttcccaagagaaaagttttgacacatacatgagaacagcacgtaggcatagaaatcataccctgattttcccggcttctaagtcatcccctgagtcagcatctagtcttcgtatagctgacgtaccaggggagatctgttcttcagaaattctatgttaaaatgactgggagcggggaggcgtaagtctcattttaaaggcagtaaggaagcttgtcatttactggaaaacagtggcatattcctttgtaaatggacaactccctttggaaattaactatcacacactaaaatatctgttttataggccttatgttttactttttgttttactttaatatattaggttgtcttgaagtgaggctctgctgtagtcctgttcttctggctctaagatctgaatgttgtgaccactaatttggtaagtgtcatttgtccccaacagctacttaaatttaagtctcccaattctccttttttagtttgtggtaagattcaaagaaaaggggaaagggcacagagatttctgtacacaatgattacagctatattaaaaaggatattaggataggctaattgttataatagaaccccaaatctataatggctcaaacacaatagtttatttcttgctcatgtaacagtacaggtcagtggggcaactgtctttcatgcattcattcagagacacaggtagagaggggctttgccttctgcagcatgtggttttcaaggtcgcctaggggtgtctccactcctcagtgcagtaagaaaagagcatgaaaaagtgcacatgggagttttttatgggctctgcctagaagtggtgcgtgttacttctactcacattccattggctaaaactccatcacatgaccacagctaaccacagaggagtctgggaaatgtagtccttggtggagcagccacttagcagtgacagctctggaggggtttctgaagaagaggtagttctctctggcacagcacataaaagaaacttggagatactcaaggataaagttgcatagaaacagtgggagaagtaaacaattatccacatttaggttttcctgactgacactcttaggtaacatctggccatgagggcaagatgcaatggatgagatttctcaacacctctgtccattatgaccctaagcatcatgttgcccatggccagtgaaccatgaaggacattttccttatttccttttacttatttttcctctcaggatcctcttggtctaggactatactggctttctcttcttcctggatctagtcatattagttggaattgtgacagaattctgctcccccaactatgagccccagtggtctataggaaagctcttgacttccttagctcgtagttttctctgctactggaggctttggaaatgtatcctacaggatctgctccaggtcttgggacatttgatcagggtgaaaattcccgaaggttagacctttaaaccaagttattaaactgttttttcttttcttttctttctttcttttttttttttttttttttttttttttttttggaggcagagtctcactctgttgccaggctggagtgcatcggcatgatctcagttcactgcaacctctgcctcccaggttcaagtgattctactgcctcagcctcctgagtagctgggactgcaggcacgcaccaccacacccagctaatttttgtatttttagtagagatggggtttcaccatgttggccaggatggtctccatctcttgacctcgtgatctgccggccttggcctgccaaagtgctgagattacagacatgagccatagcgcccagccgagaaactttttttttctttgagacagggtttcactctgtcacccaggctggagtgcagtggcacgatcatggctcactgcagcctcaacttctcaggctcaagcgatcctcccaagtagctgagactacaggcatgtgtcaccatgcctggctaatttttgtattttttgtagaaacaaggtttcaccatgttgcccaggctggtcttgaactcctgggctcaagcaatccaccacccaccttggcctcccaaagtgctaggataacaggcatgagccaccgggcccagccgagaaacatttaaaagtagactaaaaagtctcaggctggggctattaatgctaccccaaaagatgtgatatatatgtctagctttttattttcaggaaaagtttcaaaacatttactgaaataataagtggtaaagttgtaagctctgtttggagaacttttaataagtttaacattttatgtaaccttctaaccattgttgatgttggtgaagtattcccctcattcgtaaatataaaccatatgatgggtgccttgtgatgccccagacttaaaggtgtgaaataaaaatgaactcaagtctttgcctgaggtgcctggtacctagttctctagttttgtcaatatctgactaaacactctggtttctgattgacttttgcccctggacttgacctttctggcacccacatccacaccctgaagagcatgtattgtctgttgtgtggggatacctgttactggccaatttgccacagcttctcagatatctgacagaggctgatgcctggcctactctcctgttatggctgcctagcctctgcccagtccccttacattaggatggagctgaggaggaatggaatagaataacaagatgagttgctgcaaaaatacttcagcctctgaaagtctgtctttccaagttgttaggaactgaaagtgtctattgatcggggagctggctgggctagtggtataagctaatgataagaccaggttgggctgggcatggtggctcatgcctataatccctgcactttgggaggccgaggcaggtggatcacttgaggtcaggagttcaagaccagcctgaccaacatggtgaaaccccatctctactaaaaaaaaatacaaaattagccgagcagggtggcgcacacctataatcccagctacttgggaggctgaggcaggggaattgcttgaacctgggaggcagaggttgcagtgaaccgagatcacaccacaggactccggcctgggcaacaagagagaaactccatctccaaaaaaaaaaaaaaagaccaggtgaatggggaatacagtgcctgctagaagggtgcagttgaaggaataagttaagaatatgtgccagatttcaaaagcaggagccaaatggggatgatgtgttgctggaagtcctagcctaacagagtctttcaggaagggcagagccaaaggtctcagtcaacatcagggtccattcatgtgggagaatggctaatcacagcttgctaatttcaactaccatctgttatgactcctcaaagcactaagtatgcagtagttgacatatgaatggtgttagggttgggggagggggccagcctcctgatttctaatttctagctgcatattactacaggaaggggagtaagaccaccacatcaggtaccagaatttcactactgtcaacactttgtgtttgaaagaaagccatagatccctgtgaccactggatgctgagtgacctcacagacaacatcagcaaagcaggattgtgtacaaacacacattttgtaaatattttgatatttgacatttcaaaaaaagcatcaaaggagacagcctgggaaaagttagactttgttgagctttctcaaccttaattttgtattttgttatttttttctattttaatttcacatgggagtaataattcaaatttgaggcactatagtcttttcagagcttaggtcatctaaagatctgagcctggccttgttgagccatgatgagcagatgtggactgagcacacagtctcacacaggcagctcttacactagttgagtattttaatccctgaggttttagaattgtcatagcacaggtgtgcaagctcctttctccccatgggtcagcatcatgaatgttctgtcactctccttagagagttttgcagaaataccacatcatattcaccaaaactaagaattcatagtaatagggctttataatttctcacactgaaatcccctaatttcttgtcaagaaccaagttggaaaataccacacttcagggttttgtttttaactcaagaagcttctggttttcatcagaactttaaagctccctcctacctccaaaatagtattgttagaaaatgtaatgctgagactctgtcagaataagtaggtgatatatgcaaaatgatatgggcaacttagaaaagtgcatgtcaaggtaaactgctgataaaggccgggagtggtggctcacaccggaaatcccagcactttgggaggctgaggtgcgcagattgcttgaggccaggagttcaagaccagcccagccaaaatcgtgaagccctgcctctactaaaaatacaaaaattagctgggcttggtggcacatgcctgtaatcccagcttcttgggaggctgaggtatgagaattggttgaacccaggaggcggaggttgtggtgagccacgactgggccactgtactccagcctaggcaacagaggaaaaaaaaaaaaaagtgttgataaaaaataatcatcataattatggtcagtattggtgctttgacttttgatattgttattatcattattttaaagatttttttgtctttctaaattgactttcatctgggagccttagcatcacttctaactagccaaagcatgtttgattgtaggccagactccccatggagaggcttctgatcttattcacagggacatttaacctggggttcactgaaacctttgaggaatgatggatgagtcatctctctgccaaaagaagatgattcctggcattctatggggctcccagtgcattgggacaaggaggcttggaaactcctccacggaggcattgaccttgggtagtgccttccaagccagagtggagagagtggacccctcatctttgtccaaaagagcattagtataacccctcaccccaaccccaccccattctctcctttttaaaaagagagaagaatatatacaagaaaaaaattggaaaaaatacatcaaaatgttaaaaattgttgagatggtattttatgtggtgttttgcccccatttaacattatgttgtaaacattttaccaaatcactagatggtctttgaaaacatgatttttaatggctctatttccattgcactgatacattttaatgtatcagttttttgttgttggacattttgattcactttagtgttctactatttttaaagtttctaatgcatattggtgaattggcccctagaaaggtacgaatgtctatttcaaaaccttggtcttttttagtttctcacattaaaatgcatgctgctaggccccagtggtattggaagctctgaggaggagcctggggatatgcattttaacctgccctcccaattcttctgcattaatgcctgagaactattgacatgctgcattcagttcaacaaatattcagttggcaaacatttattagacaaaaaaaattaggaaactctgagctagtatgtctatgccagaatttaacttaaagtctttttttggcttctgatttttagattttcctttaactgtaatatgatgtagtaaaaagattattagctagggaatcaagaaaccatattgtacacatgaaatcactgaggcccataatggttcatttacttcctggtggtcactcagagatttaatggcaaaggttgaactagacaaagggcccagagtcacccaacctttaggtaagagacaaaaggcgccaatgagaagattcactcctgaggcaacgccctgcctcagccaaggagctcttacctgccctcagataggcatgcccgtacttcaagacactcttgggcagcctagacctagcaaggggcccacgtgcccatcttggtcacctaatggggccagactgtggtgtgccctgatccctgaggtggtagcactgaagaagctggacccaggaggacagagggcagccgtgcaggcagcatccatgtgatcagcatcacaagagcagagtaggaggtgggatctggggtcagaaaccaagacagcggagcagggtcagggcaagtgccagactaaaatatgtgggcaaatttgaggtcaaggcagggatgagttgaaaggaagacaagcaagagctagaggggaactgctgaggatttggcctcaaggatggagtcccactgtgtgacctcacagtcaggggaggtacctgccccaagccgtgcctgcctttttaaatctgaaaggtgctgtgtgctgggctgccttctgacagcaggagagtaggagcacagcctgagaggcggcaggccagagcaggaggaacctgaaaatggaaatttaggaaacaatggaaaaaacaattatagcaacaaaaaaccattttctttaaactctcaccatcctctaagaggaagtctgactattcatcctgcctgcataaccctgctgaaacccatcaacccacacccactgatcacctgacagtgtctgactgcccggcttcctctcatcccaccacctcaatttccagagcccaccaaggcatcacttgactttcaagttctgcctggacagactgctcagctccctacccgccccagttcacgttcaggttcttgaaatcaactttagtttcctccatgcctacatctatgctgatcccctgcaaaggcacctggtgacacacaagagccagaacccaaaggagctcctccacaggatcctcccagggcttagccaccagggaattttgttgatgatccccaagcttcactgccccatgcaagtctccattatctcaaggttatccctgttcaggatcactactctcctgattcttggcctcctagtccaaactcatggctccagggtcatgatgagtaagagttctggaaaagtctacagcctcccttgaaccagaggtaccttgaatcagatggagggtgactttccaagaatgcctgggccggttcaagtcttcactataatgtttgccttatgtaaaacccatcaccttgttgtcctgcacaactttcttgagtgaagcacctctgatactcagatgacattctaattgctcacgagacctggacccctgggccaggaaagcccatgtggtggtgacagcagtgcttccaaatctcacccacaggagacaaaaataggagttccatggcatccagacaaggtgtccacatgctgctggagagtcttgggtggtcacagagtacaaagttcaagggcaaagattgttcaatgggtcccaagatttgacaagtgctactggtggtcccacccttgcctctctacattgattccatgtcccacttcctctcacactatgctgataacgatctaacctgagaaattaaaagtattcacacagcctctggccaaagctacaggaagaccctggcccaggcaaactctgttcctgccccacagctgtcatttcacctgccctaccccatgggagcatgtaccactggtatcaagtcttcctgctgggccaagaggcactgcctcaaagaggcccagcatccccagatagcaatgtcccaccactgcagtcaggagcaactgggcaaacccaaagactcagcccccccatccagaaagaccatcccattttccatcgcctaagtgccagacagcccaaactgctgtgtagacagctaccaggaaaactggagcaatgagagacatctgaggtcaccgcagctaagctcagaaggccacagagcttaactgccttcttgactgtggcccatcaaaaggagcccgacacatctagtagatggcttaaataaaaaatactgaggttaccaaatgctggcaaacatgtggggacactggatctctcctacattgcctgtaggaatgtaaaatggtacagccactctaggaaactgtttggcagtttcttataaaagttaaacatatacttaccacgtgatccagcaatcctactcatgggtatttacacaagagaaatgaaaacttatgttcacgcaataaactttacatgaacatttatagcagctttatttgtaatacctaaaaactggaaaatagccaaatgtttttcagcaagttagtgggtaacacactggtacatccacaccttgaaatactattcagcaataaaaaggcatgtgctctttacatacaattcaaatggatcacaagggcattatgctgaaagccaatctcaaagagttatatgctacatgattccatttagagaacgttcttggactgacaaaattacagtgataggccatgcatggtggctcatgcttgtaatcccagcactttgggaggctgaggcaggagtgcccaggagttcgagaccagccagggtaacacagggagacccgcatctctacaaaaatttacaaaactagcgggatatgtgggcgtgcacctgtggtctcagctacttgagaggctgagatgggaagactgcttgagcccaggagtttgaggctgcagtaagccatgattttgccattgcacccccagcctgggtgacagagcgagaccctgtctcaacaagcaaaaaaaaaaaaaaaaattacagtgatagagaacagatcagtggttgtcaggatgggtgtgattatcagaggaggagcacagggaactgtggtggtgactattctctattctgatggtgatggtcatcactccagcctgcacatgtgatacgttgcatagaactgtagacatacaggtacacacacacacagagtgcatgtaaaaactggtaaaatcacataagactgtatctgcgtttatttgaactataccagcatctgtttcttggtttagcccaagtactacagcgatgtaagacaacactgggggaaggtggagaaagtagacactgtataacttcttgtacgtcttatgctatttcacaaaaaaggtattaaaactttttaaaagttgttaaaactatgtttaaaacagggttctcccaccttgaggagggggatttatcccctggcttcccctttatgagcaactcctactatttattttgccgccttctaacttgtggtttgaagtctacaatgtcctgctggctttggccgcaccctctgcttctcagagactgacagcccatctcggatggaatcaaagctcaagtatgccagcaatgaatgtgaatgtgccccatttacccctccctgagaccataacttcaaagctaggtagattcagatctaagaaatggtctcatggtgaaaatcaaggacaaatcatccttctcgcccctgtgcagtaatttcttttctggaatggctctttgctctgctcttcatacagattacactcttcaccttcaccaaatgggccctcctttaatggaaggagattaacccttctttgccccctttcaatctcattcagctgagggctttcttttaacagcgctgctgtctctgggccttgtgccacagctgaatgctacagagtgagatggctgccttctctttgaagcatttacgtccctgtcaaatacctttttgccagacttggccctggaaagacagttttgaaattaaatttattgtgagctgcctgggttggcagtatggaattgcacaaggccatgggcatttaggtcaagagggacttgctgcactcaccaccttgggagccctatcttaatgaaactcgagctgtatttactcccaggttctgcagaggagtccccagcatcacctaagatggaggctgagcatatgggctgaagtctatgcggcatcctgtccggatgtgacaatacactcacaatccactgctaccccaggactggcctcagcctccagcttccaactgtgccttagttattagagggactcaactcaagagaccatgatgagagggacagcggtgctcatttctcgggcctggctgtgagttggcaaccaggatcgtgtgctagaaaggtgacaattttaatcgctgactttccgtagtcgttggtgaatctcgtagttttgcaccttttagtttcaaaaccatactgaacaacggaaaatgaaacctgcagcttatttttagccgttcatgctaaatcatgagatttttctttgcaaaccaaagaggataaaggctacttcagcaggctaaacttagtcaattgacttaatatagcaatcaagtctggttctctgacaagtctcaagtgacattgagaagtttcaggtgatattttggccaacattgactattttgcttaaaattatatttagttgagttttgtttttagttaaacaaatgtagtatgatattttcatctgagaggaattggaaaacatattataaaccctccattctgtcatttagtcattaattcaattaacctataactatttttaagtatctgacagcttagaattttttttaattgagtcagtgtgttgaattacaaagagcagaatgctagaaattaaggaatatggcttctatgctcattgatgaggcatttatgtaaatatgacacttactctctttgaacctaattttcttctccctcaaagaaatggtttagatggcattttctaaagcgtcttccttgtcctttaattctgtgaaacacgctctgccactgagggcctgaggaaatgttgaggtattctttgggggctgtggcagtgttgtcaggccactcttatttctgtctcctctttccctgttctaggagagacaggtttacacaaagcactgtggtctgcttgccagacaacttgtggctccccttggtaaacaagtgattaagtgcttgaaagattttcatagagattttcagcccccaagcccattccttaactcctgaagcaagtactttaactttaggaagtggcttcatgatacaaagctgaggatcccactggtagtggtagagaaaggactccggagtttgatgttggtgagtccaaaacatcctcagtgagcctctccatggtgttaggaaatgctctagtgccctggaagatacaaagatcttgcaggaagcaagccagagacgtgggcttaggtagataattcaatacaaccaaaatgcattgtgtttttttctttagtcgaaaggagttaaagactcactgaggtttgttaagcttctctgactgagaagaggtgcattgttgtggccctttctgagctgcaatgtcatgtatctgagagaagagaaagcaagtaaatttattcccaggtttaagtcttgaaatatttgttgcccagggtgtgaagaaagatataaagagaagattatgctctcacatgaggtggatttttatggatctgtaagaattcttacttttttaccttcatttatatccccaccttcccttttcagcctagttgccagtctctccaaaaagatgaaactctacttccttgctgaatgtgttttgccaattcagaatctagaaggccctgttgtttcacttgctctccatctggtgcgtgacaagcagtcatggcagaaaatgagcatgtgattgggtagtaggaatgggcactcaaggtcattactcatgccatgtttcaaatgcactgatgcactgagaaatgaaagcagcaactattcagttgctaaagccgaggtagtgatttccataatggtggtgacacctgttgaggatgctcccaccagaggatttgagttgggttaggatgggttgagatgttgtctaccacagtctgccttgcagcctatgtcatttgccacttttcctttgttaaaaaacacatggtttacagttcccttttccttccagctctttcctggagagtaaccccagtttggtccacaaggcttgctgcccaatctttgccaacaggtatgtactcctttctcatgtcctacacagatgctaatggatggacgtgaggatgctcatgtctaagaactggagaaggtttcctggagttcagaatcctcaagcatatcattcacccaacccttcattctactacctatgagcgttgagcaagatagtcttcctctcctattcccaggtagggtggagctggtggattagaaagccccctttgagagccatcttgttggcatatacaattactgcaaatgaagcaggatagtcagctggccacctacaccagaagacaggagacttggagtccagctcttggcctacttgacctagaaaacaagctgggcttgattttttagaatcacaaacttttagaactggaagggacctgagacagaggcaaaatgaacagatgttaacaaacagagtcattaaaatgattttagtgtttaaatcattttaatgataaaataaagcagtaaatttggttgaggaaaatctcttacttcaaaattaggctttttaaaattccatttaaaaatatgttggaaaaaaatcataatagctacttaggttatctgttcaggagaaaaatactatttgtgagttgaaagtaggtcagttttagccgggcacagtgttatgagcctataatcctagctactcaggaggctgaggcgggagaatcgactgagagttcaagtcccacctgggcaacatagcgagactctgtctcaagagaacccaaaaccaaacaaacaaaagagaacaggctactctgattgttacactgatttttctttaactgatcatttagagtagaacactctaacaacctgataacaaatttattcacaaatgctgaatacattgggtgtaaaaggaaactagctataatttttaatatagtgaaaggctgcattaataataaactcacttatgaagtgtgtgatcttgggcaaatcgttgtatctctctcggcctgtttggtcacctgtgagagggaaaaaactagactccactaggttttaataaatacatttcaagtggaaatgtatttattaaaataaacattccatctgaaatatatttatgtcatttattttcatttattttgcctcataaaatattttttgaattatggcaaatctcccactaaaatatttactctgctttctacacttaactttccaacatggtccatctgattcctcctctttcattgtgtcttttccacctgctgggcccagcctgtctccagctggtggcatcctaggttcccacagttcccagggcctggagggtagaggctgattcatatgaacagaggtagtcagggctccaaggagatagagtcctctaccaggtgtctgcacaataataagattactgacatcagggatggagtgtggacgtaggaggaagttttatcctcttaggactggtggaaagacgtagactttgcaatcaatcaaacttaggtttgaatcctaagtctgctatttactgtgtgtaatctctattagttcctcacctaaaattgaaggtactcagtttgcaggattattgggttagaatgaaataaacattggacgtgtagctaaaatattgagtatgtagtaggttctccataagggtagctagtgtagactttttagctctgatcaatgtggaaggcagaagttcctgcccaggtctctaggcaagatgtagatgttcaaagtagctttgaactttctcaaaaatccaaaggcatttttggtcatttgtaaattaaatcaccatgttgtttccaggactaaatacgctatagacagatgtaataaccaacctcattaaaaaatcttaaactttttaaatattaagaatttaaacaaaagtgtatttggtaaacacttttatttttcttttaatttcaattggaatagcctaacctgacaacaatgtacccacaaatgttgactacctctattaggtgtaaaaagaacccagctgtaatgtttaatgtggtgaatggcataaaggaacatgcaaactgatccaaatgtttataaaccaagtattcctctgggactcagtgccctgactttatgttttttaaaacatagagagtcaagctttgttcatacttgaattatgtacattgcattagccgtgcaatttaactttaacccacaggactgcaaagaaaattagctcagcctgcagaacaacgagaccacgagcaagtaagcacgttaatcaaagtgaaaggctcacccctcacgtctagctccgtccttctccagcctgtgcctgccagattatttcgggttcctcgtgtttgactcgtcaaagtggcagaaacaggctaaaatgttcactgtggaaaagggatttgccttttaaattaatgtttgtgcacatgccccgaggaggctgatgagaagcacgcaatttttttaaatcataagtgaatgcatacccttgccactagtaatcatgacaaagcttaagtaattcaggcatgggcatggttttctgaaagtataaaacaggatttactagttgagaatgtctgcctaaacaagctcattgctttgaatattttcaactatagttcacatttgtttaacccgagcaggtctggtaaacgtaccacgtttactgattgagtgtcttggaacatcacaaaataaaccaatacatggcttttaggctagttttgacagagggtggacagagaaccccacagggggtttggaaactgccctggcatctggcttacaagtaccagtaggggacctgaccacattcaccacccttccctgtaaagggaatagaacactatttactcatctcctgggagcctaatatggattactgttgttgtcactgtcatttattattcccgacagaggaggcagatgacttagttctatgtggtcagagttgattccataacatgtatatttagcctacatgataataatttgcgagtatttttaaatgaatgtctagctttcaaacgtcattgatggggaatatctcaacagacatgaagagcattcaatgcctaggtgtttgcgtcaacctcctcccaccccactctaaggactctgcttcacagatgaccgtatattgaattggtgccttataactcagcgtgatcatctctctaattctcgacccccatggtaaaggaggaattggcctaaggacactccattctaattttctgacgctgtcaatgctaaccagagctcatagagcaatgatgtgggggtggggaagatggttccaccattggtgtgagaccaggagctactgttttcgttagagccacatttatttctggagtagttgtgggagagagatgtactccaaagagaagaggactcttgctatggttcaggtatgacccaccatctggacaactcaactcagagactttaaagtgtataggatataggagggcagggtacattccatacactaagctaaaaatcacttatgctctggggcaggagatagcatgagagctagaaacaaaagatccagttgtgaaacctagtacctcagctaaggtgtttgaacatattttctcttttaaaaaaattctggggagcttcaatgtgttgctaacctgattattttcagccagtccttacagaagattgaggtgctggaaaactagcaaccccagaaaatattaattcatttttgcaagcgttaaaattaacaacagcatattcagtgatgcaataggcaattaaagacttttggagagataagaagaagaaaactataaatattatatattcaaaatcagtctcagcattttataaaaatgttggcttatgtccaggatctaaggatgggggtgggtatggtttctttgtagctatagagtggaaaagaatctgttctatttccttaaaaataaaagacttcttgttttatacagcatggcaaataaaatgcttttttgtttttttacctgccggcaggatctggaggaaattttgctagcaagctatgctgttttcctctttggggacctggtgacactggttttgcagcaaaaccgtatttgcttattaggcatttcttaaaaatcctgaataagcagctctttcaacagtttttgttccacatgttaaacatttcattgcaattcgagctttgagtgtgtgtgtgtgtgtgtgtgtgtgtgtgtgcgcgtgtgttgataggaaggaatgaaagggggtgcataagaattcttgaatgttttttatttaaaaaattaattcctcaccattacatattgaactatctgcagaaggtgattccaatttattacataccaccaaactagatcccatcaatcttgagcagtgggggtagggaggtggttttgaagatgacatgaaatttggtgtttgagtagatgagatttaattttcggaaaacatttcactcataaaacggatatcaacccagtgtcagcactgacctcctgatgtcaatgtcatcatgcaagcatagctaaaataagcctcaaagtaaaacaaagaaacattgcatctcagcacaatacgatttcttctcttacagtatgtactatctatagccttttggtattcctattaatggcttgttactttaaaatttagcttttggagggggagggagaagataaatcattttgcattttctgtgttctgaacgcatacagtatgctgctgtaagtcttagtattatttaggtcagtatcctaaggatagctttaatcgttcatgatggtcagctatacagccagaggaattcagcatcaatttatttttctgttctgattttattctgcttccaagttttaaaaaatccattcacattttaataaaattctgaggcggtatctgccgctctgtactgcagatacatttagcaggatacatttacactgcttgtggttaaaggttatagcacggatacagacagctgatcatgcatttttctacaagcctgccggcaccatttaggattttgaaaaataatctagaaatgctataccctttatcaaaattattttttactttgcaagagcttaacagttttggttttttcttagcaattctataaaattaacatctataaaatgcatcccggaccagatacatactgtattgaaagctttcttcaggaagagaatatgagagtgttctttccagcttattttcttccttagcaaaaggattgtttgattctcagaagcagaaggacacattcattgtggagcagctctgcttaagtgtatgaaatgccttctgtctggttgcagaatttggagtttactaaacagtgtttagtgattgggctcatcttgcatcaccagttgatgacatttttctttgttccctcctacccagttgaaccaagactctgaggctgatatgcaatgtcacttacaacattaatcagatactgcatttaaggtgagctgtcccttgcctcctccttccccagtgctcgtgtgctgcatgcagtgcgtatcttgcttctgcgagcctaagatggcaggcaggattagccgtgcttgtgctgtgtgtgcatgctgtgtctagaattcattacacgttgcctagtatttcagatgtgagtatgtaaatgctctgtatgccatatcatctggtagcgaagacttgtttttgcctcattacagccttagatatttcaacatcacctttcatttccaattcatttgcttctggatgtttgcttttcatcacattcaaaatatgattttacctttttttttttaacaaaaccaaaaccccccacaaaccctaaaaacaaaaacaacaacaacaaaactctgctaccagatggtgtctctcctttcttcgtgcatttgctgtcttttaaataatgtatgttgtattgttaattaatgtgaatatcaaattaaacacttgaaacttacatgtttattatgcaggtaggaggcaaggtggattctatttttaactcttatgcactccatcatgtgcaagcaacttgggttctcaaatttgtattttcaatgctggtatcagtggtttgattttcagcaaatgtgacagtggcctttgcagtggtcagctccgagctttgaactctcagaggaggaaggggaaaaaaattcaacacaccacctccttggttgcagtctcagaaaaaccttggatgagaaacttcttttttcaatcctgttttcctgttgataaattcagttctgtgatcacagttcattcaagctgttctgcgtatgatttttgtgtgtatgtgacaattgcatctaaaacttgtgagcaagaagacagagaaatcagttggtctccatcgctttacataaaaatggctgagtgtcttgtcatgctagcactgcattaagtgatgcatacaggtaggttgaaatttgcatgtttttatagttttttttgagccatgcagcaagaacattagatgcattagaatatgacttttaaaaaaacaaaaattaaataagacagctgtaatcttttgggggagggtttttaattggacagcctctgctattcagatagtatataaatgtatagcttttacaaacttagtaaatgattctgccataaaagggagattttttttaaaaaaaaatcatatatatgataggtgtggtgccattagacaacaaaagaattttttgaaaagagtgatgattcagctccatttcagcttgaaactaaaaataaatgggtttctggagatgatttcaaagagcgtaaacaagcttaataagaaacattaaaaatatttaaattttaagaagcggtctttaaacgtgtttatgaaagatgaaaataaaaactgatatgcttccaaaattaattttaggtaatatacaagaatacattatattatgtatataatttggggggatgaggagttacaatttttaaagagggaaatattaaatatagatggccctcttaaaagaaatagagcttcactaaatgaaaccgagcccctagaatggttcattgcagaccatatagctgtggttctggcacttttcaaaataatttcatgagctctttcttttgaacttaacttctcaaatatattttagtttcaaatttaacactgggccagaacctgtttccttggtaaccaaatcgtatttaaacatgtaataacagatatgcaaaagaatgtctttaaaaaggaaacaaatgtttaatgaaaaatttacagttctttttcctctcatatagaatctgaactggttttagatggtttttaatgcggtcttcaagccttaaaaattaagccatgtttctaaacatatagagaaagcttgcacagtgacagcttttctctccctcctttgtgctcagtactttcaaaattaaggttttctttgcagtatgctccagaatgcaggtcaaggtttgtgtacagaggtgtagtttcattatcacaagttcaccagcgccactgaaacaaaaggtatttcagaaattctgagaatcagaaaatgcttgtactcttgccttccctgatccctccgttggtaacctcagtgctgtcggtagaaaaggacccacatccaagcctacccctccaatgacaagtgcaccctgaacctttgtggaaatatctctataggtgtgttaggaagatggtgctaaacctgaaacctccccgaggtttgcttcaatgtgaagaacattgagattcaaaaccatctgtgtaaatggctgctttattctagcagtttaactaatattctattccatagcactatcgtagaattgaacctctctaatgggctgaagggtggtggtggttgttgtcatgttgttttgtggccaactaaaatattttgcttggagtctttctctggttcaattattttggaacgtgattcatctcatactgattttgttctccaggcttgccatgaaatacccttcctgcaacaccttttttttttttttttttggctgttgggagccattttccttcttgcctgtgactttaaatgactaagtacattttgaatatagtatcaatcagaagattgtaaactgaagggaaatatcagaaacctgattcaatattgcctattttttttagtaccaacagcattaacagttgcaataggatcaagctaattgtcattcgctcttgagcaaataatgagccaggcatttataattaaaacactactgctagtcagaaagcttataactacaatgtcttctattttgataggccagtacaaagtaatcattttgcacctatttgaatcttaattacaagattagatggatgcaatgcaattgttttaccattaaaatgaatgcctgatagattcaacagtgtatttcttctttatagaatgtcgattcttttgtttgtgactcaagcatggttgcgtcatcttgtagattttcatacttaatggcgtttttttgtggcattattcacttatgttgctcttagtcttgcctaaaagaattttaaacccaattcaaggatctagaaagccaaataagattgttgggaagtgtatcgtaccatcgtcattctaataaataaaccagtgaatagaataataattactatatattacttcgttgtgtttcaccttaatactttgccttcatatttcacagcaatcttgacaaggcacaaagctttcctaaacttacccatttacaattattattgaatttccaagattagctgaaaatgcttcttgatgattgtagaggatggcacttaccccatctcattgtttgaaaagctatcctgaacccatttacactttttggctccggtatttttactgggcaggccagagcaggtgtgacagcaagactgtgcaaacaattgcactgttctcaccaaaacaaaatgggcaaatatgtggttttctgttggaatgatttataatataaaatactataatatttataatactataataccaagattgcatctcttgccgtaatactagagtggtattgatctacctcatccatttccatggatcccccggagatggactgggaatcagactatgacttagagcctcttcactgttatgtgagaagaatctagaaagagatctagcactttctctttagtactaggtcatgctaagtctttaagttcctggtaccatgtggttcattctaacagctcctttccaagggaaatcctgttcttaacagctctcttggtaaataaacagtcaacacatttattgagcatctgctacatgccaggcatattccagaggacgggagggtgcttgcagggaggggaataagcaaaaatatagatgtaaataaagaaggcaagtgcacagaggaaaattaaaaattttaaaatgaaagtgggccaggcacagtggctcatgcctgtaaccccaacactttgggaagccaagacgggaggattgcttgagaccaggagtttgagaccagcctgggcaacatagcaagaccccatctccacaaaaaattttaaaaattaactggacacggtggctggtgtgcacctgtagtcctagctatgccggaggctgaggtaggagtattacttgagcccaggagttcgaggttgcagtgagctagaatcatactactgcactccagcctgggcaaaaaagcaagactctttctctaaaaaaaaattaaaattaaaaaaaataaaataagtgagggttatgtggttctagggaggagagccactttaaaatggttgatcagaatgttctgaggatgtagcatttaagtgaagatcgtgtgctgagaaggatctagtcaggtgaagatctgacgtggggcattaccaggagaggagtgctcatgctcagccttcaaactttcctttctttgtgtaaatgttgctatctcagagccaggtctgacagtttcaaggactgaggcttaacttaggtaagcttcccctacagtaagaggatggcccaggtccctgtgactggttttagccagtcaaactcccagagtctggtactcatggggtcattgcctttgaccccgtcacgaccctgaaactgcttcagaaggtagagtacattgcagtgctaggtggtgatgaaattctggcacagattcagtgtcaacccaagaaatgcacagaagaaagacctctcagagtagagaaatttctgagaagcctcttgctttatttttcataagaattctggaatttaaaccaatggcaaaacattgagatagtcattgaatttttttcaaaggcaaaatggtggaagggtttgtctcatctcatctcatctggccagtagattgtcttagtcctaaaatgcctcccatcagagtgaagtttttttcaggttttgctaaaacgcttcagctctgcacacatctttgcctgttggtggctttctaaagaactagtgaggttttttttcctctattagagcaagtcattctttaaaaaattcttcttaagaaccagaactctttcatgcttttcaggttattctgttgacaaaggtcagggaacaaagggagaagtttgctatgtgagttagaaactataaggctcttttgagccttctaaacatttcagaagcaccgtctaaaattgattcattacttagctgactttgcttatcacagtagaggcggcctggctggcatgttatacttcgttgggttttgagaggccctgaaacattccacaacatgaagacaagcttgttcggttcctttgtagtagagtggggaagggggctggtggtaaaggggctctctgcccattagtggggaaggggactgcaacaattcagtttacttctttgagcatttgttgagcatctgctatgtgccaaacactgctataagccaagcagaatgaaatatgacatagtccccctatgaaactgcagtccaggttcccacacaagggtagagcattgtatggacaagtacaattgtgtatcctccctgttccaggaagaaataaatggcatgctgttctcttaatggccttttatactgttcgctagaggccatccctcagtttggggcatttcagctgatgacaaggacagttcttcacttggactttgtgtcttgacctcaccaccttcccgagatgtcttggctcctaataagccaccgtatgtctggctgcccttcttcaagctggtccgcctgcattgccaggtgacctcaataacggctgccacttttgcattcatgagcagatgttaagttgagaagccctcaaatgcaaaaatttgaatttgtgatgtaggcaagatgtttttgctttcttaccttccctggttgacagtggggggtctccatgctggctgttctgcagaaggctttccgggcagcaggtaaatcagagaccagttgcaaaatcaattgtctttgttaggtgatcccagcatgccactgccttagcctaaatgtctcattgaccagaaaattgctcttttgatctcataactcattttgcactttttcccccttaatgttctccttgcttctgcagcaattcctgctcagggttcaagactgaacactccctatgtttggcctgtggagggagtttgttttctggtgctgtttggtttgaaaattgccagtgtaaatattctttctgtgctcatgaaaagcagtggaggctttcattatatgctttctacaataaaacaatcctcttccttactctgtggtcattgctgccaaatggatattttgaaatttcttttcctcttgcttgctaaaatctcccaccctgtctgaggccttgctctaattaaggcctgacagtcctgccgaccttccccagcgctgagcatgacgtagagtccctgccctgagggccttacaagccagtgaagccagaaaacaaaagccaccagctgagagtgtggttaaatcccagaagggcagtgcccttgtcatttttttttccttttctcttgtttcttgaactgaggaagggaagagaggaacctggagcagggaaaggaaggaactacaccatggaaagattctctgaagtactcagggtactggggaacagtgcggaagagaatggggtggtcatctgggaagcaaaatggggagctggctgtagatagagagggcagcatgggggcagggtgaggatgcagaagataagaaagagggaacaaaggaagcagtcaggaggcagccagggggacaaaaggagatgccgctctgctgcgccatggagctgggggaacaaggtaccagggagaaagtgggaaggggttgcaactagaaaaagaaggctcaggagagaccttaaatgcaggttgcaggcctacggcatacagactgggtgctatgatgtactctctggcttcgctcataatgttggccttgctacttaatggccccacgttggcgattgtgaagcgcctacagattgatgtccttaaaggtgatttatttactacagagtcataagaactttccatttcttttttttttctttctttcttttctttcttttttttttttgaaacggagtcttgttctgttgccaggctggagtgcagtgacgcaatctcaggtcactgcaacctccgcctcttgggttcaagtgattcttctgcctcagcctcctgagtagctgggactacaggcatgcaccaccatgcccatctaatttttgtatttattttttttagtacagacggggtttcaccatgttggccaggatggtctcaatctgttgacctcgcgatccgcccgcctcagcctcccaaagtgctgggattacaggcgtgagccaccgcgcccagcctgaactttccatttctctcccaagtctcctattctacatgctgaggatgccagagggtccccttaccaccactcctcaccaccccctaccaccctcctccccatcactgtactagatctgaattaaacattaaatgaaataagcagactttttattcatgctatgtgatcaagtgcttttggtcatctacaaagcacagactgaagacctacccaaaatacttgctgtacactgcagattttagaaattattttccccaaagtcaggttgcccactgcaggcatgctagtttgctctgggagcccccagagccttcctcttccttccttcaccagcctatccagcccctagtctgagtgcctgtggagccatcctcaaaggatattctgattgtttgaatcgcttggtctccaggagaaccacacctggctggcataccagcatttagcactgcatcatccctgtacttcctgctaagctcttatgggaatctgaactacacgtttctgttgccttattgattttagactctatactctatctttgagggaatcatggcccagagaagatgggacttcttaaggtctctcggagagttaagtggtggaatgaaaccaggcatgactcctagaccagtgctcttttgactaaagctgccttgaggtcacagggaaagcccaaattctaaaccagaggctgacaaactttttctgtaaagaatcagacagcaaatactttaggctttatggcatgaaaaaacaaattttcaacaaattgagtttaaagatctacttggtttttattagcaattcgtgaatcaggcagcacgctatctataacaaataggaaggtattctgttgggcatggcagaacaattggtttttataaggtagcttaggcaggaacaaggaaataacataatacaaaaagcagattggttaacatcaggttactgcaggtaattttccttataaaggttaaagcagaggggactgctttatcattctggctaaaattggcctattatctctctcctaatttctcaagtcggataaacaacttcatttcagtttggtgatgtggaactttagcgtgagtgactccattttggtttggtctcttggggcttagtgcaggagccagtctaaatcaatggccttctatacatttagtttaacagtgggtcaagacaaaactgaagatacttcgtaggtatttatataacaagtgacaaagcaaattttcataaattttgtattatgaaattcaaaatacaataatatataatattaagtatagtaataatgatatactatcattcacagatacagaaatgaatgaatgtgactgtgtctcaaaacttcacttataaactctaaaatctgcatttcatataattttcacatcatgaaatactggcatacctcagatgtcacaggttcggttccaggctacttcaataaagcgaatgttgcaataaagcaaggtgcacaaactttttagtttcccggtgcatataaaagttgtgtttgcattatactgtagtctattaagtgtgtagtaccattatgccttaaaaatgtatataccttagtttaaaaataatttgttgctaaaatatgctactgatgtctgagccttcagcaagtcataatctgtctgcagatggagggtcttgcctggatgttgaaggctgctgactaatcagtgttgtgttgctgaaggttggggtggcgatttcttaaaataaaacaacagtgaagtttactgcatttattgactttcacaaaagatttctctttagtttgtggcactgtttgatagcattttacccacagtagaaatttctttcaaaagtagagtcagtcttctgaaactttgtccttgcttcatcaactaaatttatgtaatatcatatatcctttgttgtcatttcaacaaggttcacagtgtcttcacctggaatagattccacctcaagaaaccagtttctttgctcatccataagaagcaactcctcatctgatcaagttttataataagattgcagaaattcagtcccatctttaggctccacttctagttcttatgctatttccaccacatctgcagttacttcctccactgaagtcttgaatctctcaaagtcatccatgagggttggaaccaacatcttccaaactcctggtaatgttgatattttgacctccttccattaatcatgaatgttcttaatggcatctagaatggtgaatcctttcccaaaggttttcaatttgctttgcccagatccatcagagcaatcactgtctatggcagttatagccttatgaaatatatttttaataagacttgaaagtcaaaattattctttgatcaggactacagaatggatgttgtgttagcaggcatgaaaacaacatttatctccttgtacatgtccatcacagttcttgggtgaccaggtatattgtcaatgagcagtaatattttgaaagaaatcttttctctgagcagtaggtctcaacagtgggcttaaaatattcactaaactagatctgctgtcatctagtcattgttgttccattaatagagtacaggcagagtagattcagcataattcttaaaggtcctaggattttcataatggtcaatgggcactggcttcaacttaaagtcaccagcttcataagcccctaattgaagttttgaagccaggcattgatttctcctctctatttatgaaagtcctaggtgacatctccttccaatagaaggctgttttgtctacataggaaatctgttgtttaatgtagccaccttcatcaattgtcttagctagatcttctggataacttgctgtagcatccacatcagcacttacttcactttgcacttttatgttatggagacagcttctttttcacacttcatgaaccaacctctgcttgctccacatttttcttctgcagcttccttacctctcctagtcttcctagaattgaggagagttagggcctcactctggattaggcttcggctaaagggaatgttgtggctcgtttgatcctgtatcctgaccactcattctttctccagatcagcaataaggctttcttatcatttccgtgttcattggagtatcccttttaatttccttcaggagcttttccttacaacttggctaaatgcttagcacaagagggctagcttttggcctgtcttgactttcgacataccttcctcatgaagcttaatcatttctagcttttgatttaaagtgagaaatgctcaattcttcctttcacttgaacacttagaggccattgtaaggttaattggcctaatttcagtatttttgtagatgaggaaatatggaggcccaaggagaggaagagaggtagggaatggccagtcagtggaacagtcagaacataaacatttatcaataaagttcgccatcttatatgggcgtggttcatggcaccccaaagcaattacaatagtaccatcaaagatcactgatcacagatcactataacacatataatgataatggaaaagtttgaaatattgtgagaattactaaaatgtgacactgagacacaaagtgagcacatgctattaggaaaatggcaccagtcagacttgcttgactcagggttgccagaaactttcaacctgtaaaaaaagacgcagtatctacaaacccgataaagtggagtgcaataaaacgagctatgtttatattctccttttgattttttcccaataattaaaaaatgtataaactattcttagcttgtaggccacacaaaaacaggtatcaggccagatgtggcccgagggaccaaatgggttttgcaggcccattttctaattggaaacctgtaaactggggccctattggccagattcagtccacctgtgtgtttgtttcacttctaacaatgtttttagttgaatgagtcgccaatatttttgtttcttggttttaaaatgattattacctttttttttcaaattataaaagtagtatatccctattatgaggtaatttggagtgttgaacattttggccttttatctacgcatggtgcattttttaattgttgagatagtattttatagacaaactatgtatcttcttgtctacttaacatcctagcagaagcattttatgtcattttaaatacttttattaacataaccttttaaaactttatgaaaatcttaaacatatgtagtagaggctagtttaatgaaccctcagttctttgacaattatcagctgctaggcaatcttgtttcatgtaaatctccttctgtatttttttttgcactgttcttgtaacacttctataagtttgaaatattttgaaataaaagttttagaaatgtagattacttttaaaatatattttttaaatgtggattactaaaaaagaaaaataaccacagtactagaccacaccaacaaagaacaataattccttaataacatcaaaacatcatagcattcaaaaaatgagaggtcatcttttaaaaaaccaatttatttgttcaaggctcaaatccaaagaaagtccatacagtgcaattgacactattaaatttcatttaatttataggtttctctcctctctttttttccttgctattgctgtaaaattttgttgaagaaactgtagtttcctcctatctgaaatttggtgattacctcccttggtgctgttctgtgtgtttctctatctcagagatttcctgtaacttgggagttacatctagagccttgatcagatttatattcctttttttttttttaagtagtcaacatttcatagattttatataaaaatcctgatttagactcccttaggaagtgctgcagatctggcatttccacctggcaacaattggtcggggttgggtagccaccatccccattccccacctcccaaccccatttaggtgggacttgaattctcctgcaggccaaaattcatgccacttcccataagcagtttcacacatttatctgcctggctcccacgggcatgggaagttgacacctctattctaaacattgcctcttcaagggctttggtagatttactaccaaacacacacatcacacacaacaagtagcctttcaagaatgtagtagagatgagaaaaaatgatttggaaagagacttccttaaagtgcttgaagggaaagagataagcagccaaattaggggaggccaagttatagaatttggtgagaacccaggttgagggaaagaggaaaaaaagtaaaaccacgaattaaattaacagagtgctgctagtatgagagttggaatgagttaacagattcctaaccaatagtaggaaacaaagacagcaagcaggtttaaaaaagatactttagtcttttaatatattataatattgaaaccttaaagagaagacgttagtaagtgttaaactggccaagagtcctagtcagaaggtgcaagcaggcagttgtaggataacagaaacctgtgtggagattaaatgaatgaggtaggaaagccttctagaaaaggcccctggaaaaggataaggaagcatattgtgggaatagtgaagaactggtggaaatttaagaatttaagagaggagataatcttgaaagtcttgcttttttttttttttttttttttgcaaatgtattgaaatgagaagtattataaagatagaggaaacacatcatgtttagtggtcttgaaaatgataaacttttacagaaaagaaaataattatgacaacttgggcccttcctggaaatttccagatagttccccatactcagaagaatgattaagagagagaatctgtgactggttatgaggaaggatggaaaattttgaagaacgggttgattatgtaatttttagactgtgttgtttaaaactgttgctgtgatattttagttattaataacaatttggggaaatctagccacttctggagaaacatttggctctaataagaaagaaatgccactgtttgtgaattcccaagtggatgtaaagacccattcacttgctaagcctcttaggaaacccagagccggttttacccttaacaagctgttgacagagtctggtcaaggtaccacctggaacatgttaacaatacaaaaaagtggatatggattcagacctgtgtttcaatccctttatgtcactcaccatgtgaccctggcagattacccatggaaaatttctagggtgtaaaggttgttttacacacagtagctatgattctcactgtttggatggtaggaacttagaactctgaatacttaacttccagtactaacagcagccacaacagcctgcaatcatagcgtgcttacataataccaggtactcttgcaaatgcttcatatgtattatctcatttagttcttaaaaagccctacaaggtaggcactaatattaaaattagtcccattttatagatgaagaaggcacgggagttgagctaacttgcctaaagtggccttgtaagcaacaaagctgggctttaaacccaggcaggctgaatccaaagcggaattgccttgccctaccacctcccaccttccagtcacagggaaacacagagagcaatactgcatactagcacttcccaaccctggttcctaatccatgtgcctcagttttcttggaggtctttgagtaattttcagagtttccaaaagtttcagtggaaacatacaaacatgcaattattaatagatcacaaattttttaggttggaatccactattaacaacaggttagctcaggttttgagaaagctctgattggtaattgcatatacaaaaacattgcaggtttttgtttttgttttttttaagtgggaagatgaatcattacttaataaatgcagtttagttgagtagatctttctgaacacatggcatatggaggaagaataaagggtgcttggctttgaggaggttgggaaatgctaatatacatgtgtatgcatgttgcccaaactgtcggccttcaaaactcttccttttatttttaaataacatgattatttaatttgacctggagtcaatatatttttccctcattatttaaaatgttttgttggctttatatttaatattggaatctattcatcaagtgatcacattcttaaaacatggtcaggaactgggatgcagaattgcaagtactgtagattcctggctgaaaacgtaaagaattgactttttaatccttttaagctgtggccttgaattttttttttttttaagaaaatttaagaataagactctactgtcaaaacacagggaacatggacgatttaaaaaaaaaaacacctgtccattattcgtgcattagctccacatggccagcttgtggcaggccctctctgaatactttttcaatgagcagcccctggatcttggaagaaagatgccagcggccagggcccttcatttaaagaagaggactgggtcttttgcgtgaaatagtttctgtgccacgttgggaaaaatctatctaggcctctcttgacggccatggaaaaaacacaggtgactccttattcctgagaatttgatgcaattgaaacagcgactttctgcgaatccagtgtgcatagtctcgaacaggagcccacggacccttctgcggcccgaggccttgttctgacagtcaccaggctctgtggcccagagtcctaactgcgttgtccttcggcaggttctgaattgtgtcctccctgaggaggctgaggccgctgcctccttggtggggggccccggctggccactgggtcgggcatggggccttacggggccctcacgggtcccgccgccgccctcctgaggcctggtccttggcgccgcagttaccccagccccgggcccgcggggctgcgggtcgggccgacctcctcccggacgggctgcgtcctctgccccgcgccgggggcgggccgggccggcagagccgagccgccggcgtccattttctgggcggtgctgtgcagcgctgcggccggactcacgggtccggaagcaccatggacccccggggaaacgcgccggcggcgaaggagccgagccccgtaagtgcccctcgcagggtcttcgcggggccgggggcggggcggggcgaggcgcggcctgcgggcgcggcgcccgtggcgccgccagcccgatcgctcctcgcttctggagggagccgggaagccgggctggggaaaccctcgcaagggttgagctctgcaaacgcagcagaaccgagctgcccgcggggaggaagcgcccgcaggtgcccggactccggggcccgcgcccggagcggggcggggcggggtgggttcggctggagagtgcgggcaggttgcgccgcatcccgtggcccaactgcgcggctgtgctagagggcgggggccgaggaggaatgcgctcccggggctggggacgtggtgggctcgagtccagcgggctcgggcactgctttgacagtcacacctcccgtctcctggattgggaatcggaccctagtcctgaccctatgggaacttgatgatttccttgatgcaacaccaagcccctggaattgaaagggacgtgcaaaggcagggccctgcccccaggggtttgcagtctcagccgcctacttctgcagtagtaaggtctgctctgttggtacaacatacaacacaaccgcccgccgttagccactttttttatagggtacatcataaatcacctgagattttagtctgtccgcggttccactttataactcctgcactgcggtaggtaagtgcctaattccattctggacgttggccctaattgagtatcccttctaaggatcgattataggtgatatgtgttatggtgccttatacatattttaaaggttaaagacttttcttctgtgaagctcaactacttggtcagattctcatggttacaaaatgtggaagagttttgtcctggtttcagagaagcagctagtgagtcgctatatctaagtgtagcgtttttcaagagtgggggacccattctaagattgtgggatcagtttagcgggttgctactggaaatcttcttaaagatatagaatatatagtacaatacagagaagaatagaaaaaataacgtgcattgcacatagtaagggtaagcattgttttatgagacttttggttttcggtttatataatgtaaatttttaaaaccgtgggtcactgtctgaaatgtttttaaaaccctgacttactggttaatagcccaggccttggaatcaattgaatctggatttgagtcctaattgtcacatacaccagctgtgtgaccttgaacaggttccgtggtccattagagtctccgtttctatagctgtaaaatgggggaatgttccctacatctgaaggttgttatgaagacaacacgaaaccacatatgtcaaccactttgtgggtgtttgacttatgtgttcaatatgtgctaattgcagttattattgttgctaaaagatgaaatcctagcagctagtcatgggacactgcactttttttttctttttagatcttgatgtggaagaaatggaggactcagaaccaaggatttccaagtgatttcttccaaagcacaggaatctcactctgttaaagctggtctgttctaactgaggtaactaaagtcgcgtctctccttagtctacatgagataggaaatggtctttctgagggactcccaaagggtatatgattcaagacagcaatccaccaagttttggggttacaaagtgaccatgacactcaagtgatatgttactgggagaccggatgtgtgaagcccccgtgatgaaggggaactaggagatcaaggctttaggacagctggtttcttgttccagttctgtcagcaattgtcgtggggtcttttacatgtctcttcacagatctctagtttccctaggctggaaggatgcactgacattgctgaggcccggagagtttaaatgactcttcagggttacccagtgggttggggtcaaggcaggactggaccttgaatcttcgttgctcagtcacatagccagcttcagggcctctgtgaggtgagcgctctgctaggcaccgagtatacaaatgtgaagagaccatccccgggacacttgcagctgtcgcagacaaatattgacggcccagcacactaagctctaccttggagccatatacaaggtcccagatggtgacaataacaactaccatttgtcgagcatttgtgtgcatgtgtacgctaggcagtgtgtgaagggctttaagcacagtattttttatttacccctcacgatagccctatgaggtgaggaagaataggcgtaaaggattgaaatgtgaaaatagagacaggtcatggagagctttgcatctcatactgcatgtatgaagacccttctgtgggcacagctctgtgccaggactgcaaagtgcccgtcctggaggagcttgcagcctgattccagagaggcacagtaggatggacggtgcttgccattcacccccaccttcttcccctgcttctccagcagttgcagagtggggtccatcgcagggacagaccagagtcatagacacaccaaaattcctacttctaaattcaatttttcttttttctccacttaaatctatacttccacctatctattaaaacttatgccctcaatttataaatgatagtaaggccttctctgaattcattcatttatttttcatcaacaaatgtttattgagcttctacaaggcacttgggtactcaagaccagacagatttgtttttacaatcatattagtcatttccagtctcttagcaaagaatttgttgttcaactgttagcaattttctattgttaatatgctagaatgtcagctccacggatgttggagattgacccatacgtagaattccaaatggatatataggaaagccatttaaaatgtcttaatatcttcagaaaggaatttcacacttctctttaaaattttgattttgtcattctcgttacctgcttatagaggccttttcatttgtacatttaactcataatccaagaaaaagcagtttggcaagggggctttgtttggtttgaaatgttctctttttttagctttgtaggccacagaagactgtgggtattcaaaagtaaagtaatttaagaaatatgtttgtttaatttataaggtagaaaattagagatagctctaagaattgcagtaagccacagaaatcaaatcgcaagacttgaatactacctgtaataacttaatccccaaataaaacgaatgagatgttgaatgtgaacatgctttgtaaacttgaaggtgttctgtgaatgctgtacagcatactagaagtatgactgtgctagagagaatggagaattcagctgccacaaaaatctggtctcttcgctctcagactctgttgaggaaagaagatatgcagaaataaccacgtgataaatgcaaaaagaagatattttggtaatttgaggaggaaggggtcccttttatccctggcagtcaagagactcttgagaaaaagcatctaagcaagtccttgaatgatgtggcatttcaataaaagagatggagaggaggcatttgagataggaggactagtaggagatggagaaacttggagcatattcagggaaaagcatcaagtccaactgagttagaactggtctatatacaggcatcaaaactggagaacattcagtgccaaatgatacagtcttgaatgccaactaggaattgtgaatgcattaaccaataggtgtcattaaaggtacttgaacaggggagtgttgtggctgtgcttcaggaccaggctcttgtgagtagcttggggggagatcgggaggagaggcagggcagaaactagaggccagaaagccagttaagctactacaacccaccaaggaaaaagaggggcaggaaaggcctgaaatggatgataacaatgaaatgggaaaggaatagatgcaaagggaagaactgacagaatctgatgtctcagtgaaggaacagctaaagctgacactgcgatttccagagcagtggtacccatggaggaaactcagaaggaggtaaggagctacattttagaggtgctgtgtttgcagtgttgaagcatgctgtctcccaggcagaagggggctttgcgctccacaagaaggccagggctcatttgggagtctttggtttataagaaaaagtcaagagatgggaaaagagatttttgagagagaatataggggaaaaatggttgaggatggagccttttgagaaaagaaaggaagatctagggaagcagatagaagtctggcaagatagtaaggaagaaccatggaggaatgcaactccagaagccagcggaagggggttcctaatggagggagccaggcatgtcagaccgtggaaggtgagggatgagcttaggaagactggtggattgacaagtgcaaagttacattgttggtgttttcctttttaaggtaatatgacgtgtatgatgaatattaagtggtttaatttacacaaattaaaccactcaaatttacacaaatcaagaatcactcttaaatttgtccccggcaagtcccaaaacacatttctgattatgaaaattcaggctgttaaatgtggttttgatagtagtcatacactgtattctgttgtcagcatacaaattaaagaatatcccttaatagaattgagtcctttaaaaaatacatttctgttgactcaaaaagtttctaacagtaatgtaattccattgccttttaccatatggctattgtatgacatgtgcgtgtctgcgcattttcacgtgcatatgagcttagtacaatggaatgaggagaccggggtcagataaatctagtttcacaacctagctgggccactttccagacttgtgactttagaagagtttctctctaagcctgactttttccatgcataactcatataggattatttggaagactaattaatacataatttggtcaggatttctatataccatagtaggtaattaattaatattggttcccttcccctcacaaccttgtatagatatgtaaatttatatattgtgcatctacacgtaaagccttatctttaagactcattttaatttttaattttatcacagaaagcacacatctcctattaccactgatttattctgggttagtcccagtgatcatcaatttagtatggacaagaatccacctggggaacttgtcaaaatgtagattcccaggtggggcaagggaatctgcattttaaacagcactgtcatggctggtgacgaagattaacaattgccaatttctgcgaagcagaggaagagataaacctgagatttgagatgctagtttcaactcctgtttctactagagatatgtctatactcaaaatttttatatcattaatgttaatggattatatgcataatcagacaaaaacaaatacgttccagagagtcagggaatggtggtattattgcaccctcccaccccgcatcatctcattgctctctgctgtgtgatcacagtactgggtaacaagctgcctgcaaaccagtttctttttctggggaataagtgatgacaccctgtccccatggccagagtttgcaaaaccattgtaacttgtttgttagcaatatgtgacaacactacagtcatgccattaaagtattctacatgactctgtcttctggtggataaacatctctgtcattgtattatttccctcaatctctgcatcttaaagtcacttaatttttaggctaaagttcatattcttcatctatcccaactccattttatagatgaaaaaatcatttggctgggcacagtggctcatgcctgtaatcccagcactgtgggaggccaaggctgatggatgacctgaggtcaggagttcgggaccagcctggccaacgtggcaaaaccccatctctactgaaaatacaaaaattagccaggcatggtggcgcacacctgtagccccagctacttgtgaggctgaggcaggagaatcacttgaacctgggaggtagaagttgcagtgagctgagatcgcaccactgcactccagcctgggtgatagagcaacactccatctcaaaaaagaaaaaaaaaaagaatgtatcatttttttcttcctaattctagcttccctctttgtttattcacaacaaaggattgagatatatagacatgtttggtgtttaacttagatatggaaagtataaaacatttgacatgtatatggaattgctctttatgttctctatacatagtttagaaatcagatgacttattgggaatatatttatgaaaactatattgagtcattttaaaacgatgtcagcatcctcttgctggtttgcctctttggaggaggatgctgatggcctggagcctttcctagaaacagagtttctctctctatacccacagctcccaaggaaagaggatggaactgacattcatggagttaggtctgtaccttatatgcattatctcagccatcttttagaacctcagacaacatggtgtggcaagtgaagcaaaaagaaactcaactacagccaagattgtagagatgggagtttatttttttttaattattattttttaagacggagttttgctcttgttgcccaggctggagtgcagtggcgctatctcagctcactgcaacctttgcctcccgggttcaagtgattttcctgtctcagcctcccaagtagctggcattacaggcaactgccaccacgcccagctaatttttgtatttttagtagagatggggtttcaccacgttggccaggctggtctcaaactcctgacctcaggtgatccaccggcctcagcctcccaaagtgctgagattacagacgtgagccaccgtgcccatcctgaggtgagatttttacaccctggggtctgtctgactcacaaggccagcctcttctctccacactctgggctgcctccccagccacatagtgagagtatgaaacaggtatttgttcctgattttaactgagaggctcagagatcctcatccttaatattattgtaacctcagaatttttgacaagaagcaaatggagcagagataatgtgcaaacttgaatttgttcagcaaatatttacttagtatcaactacgtgccaggtaggagatcaggaccccaccctcatggagcctccctatatccctaacctatccttatctactgtctgtgctgctgctgcaagcctttcttttagagtaaaacaccaatggagttccacactgatcagatcaatcaatttgtgtcttgctatagctgtcactgtcactgtgctgggctaaatgttcccagagcctataccagttgaaagtttaaaactgctccttgggggattgcccagagggctaagtaaatgtttgttgattaccctctgaggccctgaggaactctacagggggctaggaaaattgcccagagcccctgcagggctgggttggggtgagaagaaagacattcgtgagaatccagaggggaggcctaggaattgttcccagcatgactttgcttgtttggtttcctcacctataaccaaagaaggttttgctcaatggtggctgtttccttccggctctaaggtgtagtactttattttcttttgagcagaaaagcagaggtgctgggacaagcaggggcagggactcagtctgaggtctcccaggggtctcaatgtagtagctccctcctgtcctcatagatatgccgatattagccagactttgggttctgcctttaaccctctacacttgaggaaagtgcatgaatttaagggtgggagattgtccacttttgagggaatgaagactcttacagaaggattgggacaggctggtaatcatggttttcaaatttaatgcttacaaggaacctgggaaataaactagcccgacctctttgcattccagataagaagagtccagagaagtcttaggacttgctcaaggccacatcattagtggcaaagtgggaacagaacccactgtcctaggcccagtctgccagaaaaaggcaggttatcagaagagcaggagatggcagtcagcagcaaagcttaaagaaggactggcattgtcccatgagagcaagctgaccatgacatctgctgggcttccagcagacacacgcagtaggacaccgtgatgcaaagcttccggtccagttggagcccttgggtttttgccaattaagatagtcaagcaaatttatttttgacctgggagagacagaaggctgttttccatcttacaaaagcatttctcctctcttatgtaaatgaaaattcctaagctgtattataacttaatattgaaagaaattaaaacatttacgcagggagagaggaagacccagcttgcgcacccctatttttctggccactactgtgagtgttcataccaggatgcattttcatgaaaaatccagtggctgtttaagtcctggaagggtatcttgggattatttcagcaacccgtgaaggcaggctttgtgcaaggtgagacagatatgagctgtcacttcctgctttgtgagttggatattgtttctaggccctgttttatttatgttatttttcctgttcatgtgttagaacaactgactgtttgtagagttgatgacaattagataataagaccaccaattcagtccaaacaaaaatgaattcattatcttgccaggcaagggagacccacatattcagatcagtctccccatacttttgtgcgttttcatgtaagcatggagatttccgattagttttaatagcacagtgattggctcctagacacctaaatgaggatttcctttttgaaaaacctactcagcattctgatctgtccctgcttaaacctatttagtctggtcttatagtccctgacttgagcccaaagagcaaggtttctcaaggtctctgtgcaggtctttgatgctctttcgtggaagagatttacagtggttacagccataaccggtgcctgtggctgaaccatgccttctgtagtgtgttcagcccttcccttgaattaatgcaagttccacctttgctttaatgggaggggacagaaggaccactttgaggaagcggaggcaagaagatagtctgcaaaagccatgacgtggcactgaaatgaagccctgtgtagggttttactcagacgttagagaactggctgcccctgagtgctgtgctaactagggaaagaaaaaaaaccctgacctttaaaatttttcctgtgaaggtctagcaattctggagtgtcttcagcgactacacagtgtaaagcaactttttgcacagaagcaccataaattacctaaatggaaatttgcttctaagtgaagttcttaccctgtctgttggatatttagtattgtcaatatttgtttttgtttttgacattttcaggaaaccaagagctttttgtcacatttgaagaatctcttttaagagtttcttttctatttataatgcgtttctgataagaagatttgcacctttctctattttagaaaatactttttgaggtcttttgtttttccttttatgaagtttaaatagttgtcttaacctccaatcctagcaactcccttacattaaaaatgacctatattttttttctcccatgaggttcctttgctcagagagaataagaaaagttctggtaattagtcactgtggtattctgtaaacaaatactttggaagctatgatttatgttactggtcgggaagaaaaaaaaatggttttgtgtatctctagacgattacccttgtgaaaggcaagtgcctcgtattcccaaaaggtctcttgggtgccctgtttgttgtgttaaggtctctcaaagccggtggccattttctgcgagctgaatccctgtgtgaaactcctcccactgtgaggtctacgagcatttgttttctaaaatgaaagcacaggcagaaactcaagctattctacagaacagtctgttcttttgatttttttttttttagatcagtatatttaaagcataatttttctaaacaacatattgcgagtgtttacctgcagtggtttggagtttgtttggggagttttaattattttttaatgtagacaacttatttaccaacatcattgctccttctgctcagataattctaccctaaaccaggtgaataggggaactatgtaggcacctgactactgccagaaactttccttctgtttctattacctttcttttggggtgaaattggcaacagctcactggaacttagctcccttaatattctttctccctcccacaattttttccactcggttttttttttttatctgaaccattgttcatccatttgaaacactggccagagtttttgtcgcttttccatagtaggaaagcctttgtgcctctctttgtacctcagacctactggtgggcttgccggacagctctgccaagcgcctgcgtctcctgagcctatgaagaggcgactttcacaatcctgtgctgccttcgagctctgtgctgccaggcctggcctccctccagaggtcgtagtgttgccagcagtggcttcaaactggaaacatgggaggaggaattgtgggaaatggggaagaagaaaatgtttgtgcagggaaagtgtgtacgtggacttaaataaatatctgagggcccaggcccatacagatgatctctgtacgctggtattttgcgcctggagccaggtgtctgttgacagtggggaggaggtggggaagacccagccggccgagagcctcagccaccttcctgcaggaggtcctcacaccccagacggtcagaatgctccccagactgaggaatcagctgcacatccccctgatgtctctaaagctgaaatctgcttcctgggtttagccaccattttcattgagcagttctgaggattccttgtgggtacttgtgatcttggtggagatgcttcatggtgttgaccctattgttttgaatacctgacagctggatggtccaggccctatttctatgatctgttttttggaactgttgtatttgtgtgacacagtgatggagcatgatgtcaactcccacatactgtaacccaggaaggagcatgatgtcagctcaggataccggaaccgataaaaactcagtgagtgttgcttcccccgttacacacctgctcatgatgacttgtgggatgcttgttttaaaggagagctgagtgcctctgatagaaaatctgatttcatgaaatgcttattaggagttaagtacccctttttcttgaagcttgaacagactttatcattaatgtgactgactggagcaaagtgaagagtttgatacctgccactctgtctctgaagatttacgtagagaaattttccccataggaatggacaaactaaagggatccttaagaaatagtatgtcacccaaatatattctgtggtaaggcttctcaacacctgttcttcattaggacggagcactctgagagttttgaaaacttgaatactgacatctcatcatttaaattttagaaggacaatgactcacagtacagagattaaaatttcacaggcagaacaaaacctacatgtgatttatacttacgtttttatagactaagatctaaaactcacatacatacaggaacaggaaagtaatatgaacatcaaatgtgggcttggtataagaaggtaagcaagtggttagattgtggcaaactggaggtttgaaactttttcacacagataggggcctgatgagagcgtctgcaggccgaatggagcctatggactgcttcttgcatgccagttgcacgccatttgactcagtccgctgatccgaattccctcagtggcaacctgcccagtcttctcctgcagagcgttgggcttgaagctgtctaaggcccagcccagggaaaagtaaagaccattgaaccttctccatgtcaccacaaataagtcagccacttcagatataactatgtccatttcatacaggcaaagtaattatgtcagtggggtcagtagcagagcatagtatttgtgtccagggacatctggaaggcatcagacagagcagccctgactaagttgcccagtgctcagtgtactgatcccagggtgagacaggaagaacatcagaggaagcccctctgtgtccaggcatgtccgtcttaaggcagccagatggaaccaagcctgcagaggctaacctggatggcatcaggtgatggatgacagcaagggacagcagatacgtcctggtgtacttggtctttggtatgtttggtccaaggatgttttctgaaatatcaaacagtgactccttaactaggcctagactgggacaatctgaggattgtcctctctgcctctgttgacactttattgaccttccacacaccctggaatttacagtgctttccctcttttctgcatatcttttaaccctgccctttctttctcggtgctgagtcataatgtctttgacgcacatagcacagggcctgggatgtaaaaggtgctcagtcaatgttagcttttcttgtttctggcatcatcatcatcatcttctccattctagctattatttcaccagaggtcagggaacttggtttccctacactccatttaaaccacatcttcaggggtacctcagccatctccaccctgacatagatgaagacggaccagacatacaagaaccttttctggaatctgtcctgtttacgtcacccattttcgttgtaggagttgggcttttattagaaatgcaagtttctgccattataagtcaagttgtagggcttatgctgtgtgggctggactctaggggggccagggtggaatcattctagaaacttgttccaggatgacttgaccaaagaaaagccatcagatgctgttgcagtggagtcctgacatttgctacccccagtgtggtcctcagactggcagcatggacatcctctgggagtccgttagaaatacagagcctcgagccctaccccagacccgctgtgtcagaaaatgcacttaacaagatcctcagctgacttacacacattgacatttgaggagtgctgctctagacactctggcgaagcacagagacagactgacatagagattggcctatgtaagattgtggacttgctaactaggaggtgcattggaggctttggtcttaggcggtggggttgagggttgtgccttttaagccctgctgtagaaatgtatgatggggtgattgaccacattaagaatctgattctgaagactcttgttgtcccctggttgtgactttaatcttatagtgcctcattcctttccaccatctccagcccccactgaccttctggccttggaaaccctgttgccaagcagggaaggtcctattttaggggacagaaaacctttgtgtatcagggaactgacataaataattataatgtaggattttaatggtggaacgtgtatcagtataaaaacgaggggtggtctgctctcagtgaatttttatgggacccttgtaggtggtgaaaagggaggtgtagctgaacttctttaatgttcatggctgagggcattgcctgctcctgagaaaacaacgggaaagacagaaataattaatcccatgctgccatggtgacctgtctggactggaaactactagggtggtgagaaaagggctgcagaatcttagagaggaaattccagcttcatattacattaatctagtttaaaaatgaattaaaagccttttcagcccttccaagttcttgcctacattttgagggcagcatggcctggctttttgtgaatttatggttgttgtgatttttttccattccgtggagtactctcaggtggtcctttgccctggactcacagtggcctggggtcccttgagcagaacacaacttgggagtgcagctggatatcttaggagtctctgagctggctcgctctcccttcctctcttcttcctcttcctaccactgtcaggaagcttagcgtggagttctggatcccagctccctctcacattcattcatgtgagctactgccatggtgtcagtaatgggttgaatggctgcaccccaaaagatgtgtccatgtcccagaacccgtgagtgtgacctaatttgggaaaagggtcttcacagatgtaattaaggattctgagatgagaggtggactctaaagccaatgacaggtgtccttataagagacacacagtagagacacttgtagaaaggagaaggccatgtgcagatgaaggcagaggataagcgttacgcagccacaggccaaggagagactggagccaccagaaactagaaggggcaaggaaggattctccccctgcagccctcacagagagcacggccctgctgactccttgattttggacatctggcttccagaattgtgagataatgaatttctgttgttttaagtcaccaagtttgaggtaatttgttacagcggccccaggaaacaagtacagtgtccaaacctaaccttgatccagcagcacaagggagcttgttagaaatgagattctggggccttaccagattcagtcagtctggagtggcacgaagaaatgaaatcgcagtaagggtctgcaggtggttctgatgcaccagcatccattgttcatgctccccttttagccctattttcttttcatccaatttacttcaacttgggcaaaatgcatgctcacgtttgcaaccacctcccatatgtcattgcactgtacatctgaatcttcaccccagctccctttcagcactgaagtccattttggatgtctgttgattgagggagccacctgcattttcctcaggcttctcagagggagcacagacttcacaaccttcattatccacctcccaaaccagctctttgatctgggctcctgacctgttagtagcacatctaaacgcagtagaacaggcacgtcagtcattcttgctccactgcctttcccctaatttccagttagtcgattcttcatccaaatagctttcaaatttttcccctctctttcatccccacctgtctctttgccttctttcagactttctccagacatccttctagccaaactgctttcagagtgacctgtctgcaaatttgtcaaatcattcctatattaaatcttttaaatgacttgccattgctcaagttgtacatagagagcttattttaaaagcccaggctgtgcgcagtggctcacacctgtaatcccagcactttgggagtctaagcaggcttgatcacgaggtcaagagatggagaccaccctgaccaacctggtgaaaccccatctctactaaaaatacaaaaattagctggcgtagtggtgcatgcctgtagtctcagctactcgggaggctgaggcaggagaatcatttgaacccaggaggcagaggttgcagtgagccgagatcgcgccattgcactccggcctggtgacagagcgagactcatctcaaaaaaataaataaataaaaaataaaaagcccaatactcaggccccacccaggactaaacacatcagaatcttgaattggggcctgagtattggtgttttctcaagtttccaaaggcgatttcagtatgtagttagggggtgagaactatgggactagaggataaggcccaaactcatccagtattggaaacttttcatgaccaggccccaccagggttcctccccatctcctagcgcagccctgcacatgcctgtggggcagccatcccacctgtttgcccctccccaagtgtgtcattctatttcataccttcctgcctttgcttagacctctgcctacaaaagaatgcctttttccctcttggattccaaggaaattctccctatccttcaagagcgagccccccctcccttgcactgactcctgttccccagtttaaggctgcttcctccagagccctggatgccccatcagtgaagcactctcatcatcataggagctgtctgcacgtctctctcctccattggagagtgggctccaggaggttgctgaatgagggaagaaataaaagattcaaaaaggccaaggagaggaaatcattctgtttcttagaattattgtactgatactgcattatacctcatcagatacttgttaagaaaacaaaactctgcttgattttagtgaaagcattgaaaatgtgttagtagtagtaatattgtgtaccattaattgaatatttgctagctaaggtctctatattcactgccttcttcagctatcacaataatcttctcaggtgttattctcattttaaagaacaagttaaacaaaatactgtgtgatcaagtaaacgcaagatggtagaaaatacaaagtagaatatttacgtgatcacctggtcagcagtgtgctaatggcatgctatagactgatcaggaaagactggttttgttggtaaagatagctaaccatattgtattagtctgttttcacactgctgtaaagagctacctgagacggtaatttatgaagaaaagaggtttaattgactcacagttttgcaggcttaatgggaagcatgacagggaggcctcaggaaacttaatcatggcagaaggtaaaggggaagcggcatcttcttcacatggcagcaggagagagagagcaaagggggaagtgccacatacttttaaaccatcacatcttgtaaaaactcactgttcaggagaacagcaaggaggaaatccgcccccatgatccagtcacctcccaccaggcccctcctccagttcaacatgagatttgggcagggacacaaactcaaaccatatcacatatgtagtttttttgagtggcagatacatgtatgacactgaatttggcataaaataagcacaactgttaagcataccaaccaaaagatgagatggtggtttatatttgctaatgtttagaatcacacaaatctagtcttccatttaagtacgttagaagttagtttgaagctcagagtcacaagatcaggactgaaaacccgacctttccagtgacatgtgatgtggtgctgggactttgtcttcatttttctgagccttggtgtcccatctttgaaatagaaatacaatttcccagcctgcagtagcatcgtaagaaggaaaataaggaggggtgtatgaaagagatttgtaggccaggcacagtggctcacacctgtaatcccagcactttgggaggccgaggcaggcagatcatctgaggtcgggagtttgagaccagcctgaccaacgtggagaaaccccatctctactaaaaatacaaaattagcaaggcgtggtggtgcatgcctataatcccagctactcgggaaggctgaggcaggagaatcgcttgaacccaggaggcggaggttgcagtgagccaagattatgccattgcactccagcatgggcgacaagagcacaactccgtctcaaaaaaaagtgatttgcaaatggtacaaggctacacaggaatgaggctgggtgtttttgtctttgttctgtgtttgggttgagaaggttggtctttgggaggagtcaggatgaggaaggtggtgttctgctgggtaagcggatatgggcactgaaacaatcgcaggctgcctgaattccaggcagggtggggcacgaggatgctgggatgtgagcctgagaaaaacaattggaatgagctacttagggagaatgagggaatagagaagaacagttgaaaattagagtcttgctgtggttttgaaacagtgaagctgagagaatgtaattggttggagttttgcactgggtcacctgtaaccaaagaccagcccagagaccacagatcagttccagggagcttgatatcttgatcttttattcttaggttattcccaacaattctgctcccaggagctctgaaactttctggatctgagttcaagagcttacttgccttgtagcctcagtaccttgattccaaacatattgatggattaagctgttcagaactgcttcctacagggtcacatcctaatgatgtgtgctcagtttccttctttaaagatgaagccaaggctttctctttttttattctaatagatttaaaaatattttctaagtataacagtactgatctcaaaatatgatttttggggaagaagaatgatccctttctgctgctctgtggaggtgagctagaatacagtcatgtctttttatcccagtcatcaccgtcctgaacttactgaaagtttctagagcaggaatcagtagagcatgtttaagtgatcagtagatgtattttaagatagaattgatgttctaaaatacctcagcaggcagagaaaggatggataaaacaaacacaattaagtttaaccagaataaataagggaaattttgagtttcagttaaaaaaaaaatccagtcctggaggtttggaagccataggagaggaataaaacaagggaagaaaggagaagttcaggaaaaaaaaaaaaaaagtctgtatattataaataaaatcaattattgagcacttactacttgctatgtacttgctgagtgctcatatactctcaatcctcccagaactccatgatatgtatagtagtcactccgttttatagatgaggaaactgaggcttacagtgaggtcaaccactttaataagtggggtcctagcatctgccatttgaggagtatggcataataagccatgtggaaccaggagtctagaaacttctctcttttttttttttttttttttctgtttttaactaagactgggtcttgctatgttggccaggttggtcttgaactcttggccttaaacagtcttcccgcctcagcctcccaaagtgctaggattacaggtgtgagctaccacacccaccggggagtctagaaacttcttttggtcacactatgagatcttaggcttttctgtagagttttttgggtttttttgttttgttttgttttgtttttgttgttataagggagtagctgaagaaattggagatgtatagcccaggaaagggtaaacattcaaagggctgtcgtatggcaaaggctacagttgagggcccctcagttgctccctccctggtggggacttctctaacaaggagattcacacactggctggagccgtcctcagcccctcaccccactccccatctgaagaatctctaaaatccattcatggcaaataagaatgagtcagagtgcgtgttccactaagcatcatgccctctgtgctttttgttatctaaaacatcccaagctctggtcatagtgaagtgatgcttactcatctgcccattttgagaaaggtcttggggctggatgactggctacctgggacccaggagcatttccttgagtggtctcagcaccatcttgtggacacagcactgtgaactggggatgggctgtggtcatcaaatctaaaggaaccccaaaacacaaccctgaaaaagctgccgctggggaagggctctgcccaaggaatcctgtttttaagagggactgcctgccctcagagctaggaactgccttggggcattcacttttatgactctagcctccttattaagcccatgacacctgaaagcagaatgggcaggctcagcaatgcagaaagagcccagcctttccaggagtatgctgcagtactgggctaccgttcactcagggggacagcagaggcctcctgggtagggggagccccatgcccctttctctctggcctttctcctcctgcatcctgccccacctctcgggccaggacacccctgtaccctgcctcccctccttgcctggcacttattgcctctcagagcataagtcaccttactgcgtttaaaaggcccctcgccaccaaggcaaggatggaccaggatgaagctgtgaagggaacagagtgctcctatgctgaaattctttggccttcttagcctagtctcctaatgctctggtgaagctgggtgccctgatgtttctatgtgtgaagaaactgaataatcatctaattcagggtaaagtgatgctcggagggcagatttgctcaatctctttacttggacgggaaggggcaacgtttaggcctatagaagccactcaaggggtagaagctcccctctggttgtttgaacccctaacctcttctctgtttattcttcacagtggggctgtgcgggtgccttatccttaatgggcatgcagggctccccaaaacaatatagtcacttaattttgtgtctgttaacacacagttattgactgtatttatcacaatattgcatcgtgatgcatgtatctattctttcaaagtattataaaaataattttttatataattctttgaaagtatcaaaaaataggtttttttcactgtaccaaaaatattaacatattctcccaaagtcttaatatatgaactcttactgtattacctataatcccgtattttgttaaaaatttggttttgcatgtgccttccacaagcactttttccctggcttcccttcttttggggtcagcctggcctgagcccttcagctcctgacgatacggcctgcagagctgatcttgccaggacttagaggaagctcttaaagcctgaatctctccaggccactcaactctccacttcagcactagggaaatctccacttacaaactgaccctgcttccaatacctttcaactgtcgagcatttaattggttgctagtatcataatgagatggactggagaaaaaaagctgtagttataggtttttgtttgtttgttttctggaattttcatggaagattacgagagtgaaaagcaatagaatgagatactacattttatctgtattatctcatttaatccttataagaatgaggtcacactgctgtgtccactttatagtttttttaaaaaccaggtctagagatgctaattaacttgtacatgtgcatacagccagcaagttagcggaactgtaatttaaacccaggagtgggtaaccagtgctctacctctgaagacaaagataactcactatacgggaagaaaaaggatgccccacagaagaggaaaggaaagcttggaactatcaactacatttgacagttcccggtaatttaatcaaggacttcaagggaagcttgaaccaaaatctaaaataaagcacaataaacatgccaaatcccaaagtgaacccaaatttttaattattttttactgaacaaaatacaaactaatgaatccactaaactgagacttaaatgaaaaagattctaaaatcaaaaacccaaaacaccaaaatattctctaaaataaattgtaaccaaactgatatgttattaaaaaatcccctttgcatcaagagaaaggagcagatgtgatttgtcaagtctgtaaacagatcggagaggtaatgaggcccagtgcaggagaggcttctttaggaaggtgaaagaatgtcactatccaaaacagacaatacacagataaaaccctagctttgtttttattcatcaatttatacccaaatttgagtgaccttctgatttaagaggataagtccacataatggaaatttattgatgatctaagtatttatcttaaacaccttcctttctaccaagctttttactggaacaggtaataaacagtgaacttgaaagactttttatttaaatagttactgccagcttggtgtggtggctcacacctgtaatcccagcactttgggaggccaaagccagaggatcacttacgcccaggagttcaagaccagtctaggcaacatggcaagaccctgactctacaaagaaataaaaaaaattagctgggcatgttagcgggcacctgtgatcctaactactcaggatctgagatgggaggatcacttgagcccaggagttccaggccacagtgagcaatgatcaagctactgcactccagcctgggtggcagagtgagaccctgtcagtaaaaaaaataaaaataaaaaataataattcctttttccatttgcttagaagagatgctaacaatgcagctaaagaaagaaaattatttaaatgatagttataattaaatgcctgtatgtgtgtgtgtgcgtgtgtgtgtgtgtgtggtggccaaagctcacatgtaactgctgtctgaattaagaaagaataattagttaatgagcccctatggggtatcaagcactgtgagggggtctggggaactctggacacacagtgaaataggatatttgtccctgccattgaggaatttcacattccctaatttggggcctggggccaaggcttagctaatacttgctcctgctgacatttttgactaataattaattggtaatagtaataataataatagctaatgtttatgaagcttgatttttatgccagatactataccaagcactttaaaggtaccacttagtcctcatgttaacccaagtatcttctattattagctcccattttgcagaggaagaaactgaagtgcaaggagtttttaaaatttgcacaaggtcacagccagagcatgacagagccaggtcccccagataccaaagttcagacttttagccactgtaccagactggacatggtgtgccttatcctaaagtatctatcgtagagccctgttttaagaatggaataacatggaaagagtaacaatgctttgcgagtctctcagttctttcagttcagcaactttagtctccccaccattccttttctatgcccccatcatatggtaactctacgtatacattcaatattatcttgaaatgggagtggataaaaatcaaaatcaaaataagtcatattcataagtgccatatattactttgaagttcacattttttaagaaaatgaattaaaagtagaatttatggaaaatactgaatttcccttaaatgttcaccccagggccacctggtggtcccatatagcatctttgtacatagtgagaaatggccttcttctggcaggcactgcagccctgcaccgagggacatgcccagccaagcagagcctgggctgcctctcagcctaccacagggcatagcctgtaccccacacgtggcagccctgctccaggcccagttacattttgccagatgtaaactggtcagtaggctagtgtgatgccctatgagccttcaatagtttggtcgctaaatgaaaccaagaaaaacatggacaagctaagttctttatgttttggtgctcctgcacctgaaatggaaagtgtggttttgagtcatgctgcctgggtttgaatcccagctctgccaccaatagctaaacaatcttggctgagttccacagcctctctaaacctcacttttctcatttgtaaaatgagaaagattgctgtgaggcctaaatggaatgatataaatgcagtgtgtagaacggtgcagagcacacagcacatatatgcttgttaggtgttgggacacagcttggatgacatatgtaggtgacttcctcctgtcaaatgatgtcacaatggggacattgttgcatttgtttggagtatgggcatgtcactttaaagcagttctcagacaggctgcccagaggggctccagcataagcaggagacatggtaagctgttccttcatagtgtagtcagaagtcacaggccaggtcgtgcggactatatatcttggtaattttcagcaggatgcaaaagcacacctgcccagaccctgtctcccaaaccctggctcagtgtcagtgatatcattgatctcaaattctttttgtggttccacaggtgagtctgatatgcatagttctgagaacaaccgttataagtacacacgaccgtgccttttccatctactattcattgcctgatggggggcaagtgctgggatgcagagcatctacagtttcatgacccagcagcaggccacagacccagcaccgtctccagattagctccttatgagaggaggagaggaggccgggggagggagcagacgccagaaggaagtgaccggtgaatgcagggtggaaagctgccagagtgtgggaagggaagatgtcacgtggaagctaagtcctttacaaacacccagcaccaaggcctcacacgacactgccatgtcgccacctttacaacttttttagtattaaattttaaagaatttgttgccaattcagcccaggtactcaagacaaaggccaaattcctggactttgaacaaagcatgtcggtagtgcttgaaagattgctctttttcttccttttggccaaaatggtgatagtaagcagtttttcagtgttccagagctgtggttcagtgttttaacttgtttgggctgtaatagctttgtgggcagtggatagctctgttttatcttatgcagctcagctttaggccagcaatgtcgatttgtgtgtggggtgggttctttttcctttttcatgtcagaacaaccttcttggcttttttttttatgaccacccattagcataggtgggaaatagcagggcagttcaggttgacctgacactgggtctggaaagctcggtaacagtgccaggtatgataggctctataaagcttagttttgggtgctttctgtttttcattcattcagtaaaggtttattaacaattattatgtggcagttgcagggctgagtgctaggaaaactggtcaacagtctcagccctcatataatttttactctgtagtaaaggcacagacttgtcaagtaacttttaattacaatcataataagtactatgaaggaaaagtatgctaaaaaatatataacagaggcaccagatgggaggagagaagtgggtggtggatggaggtgagggtgggctgcccaggctagaaggacattccaggctgcagaagcagcatgtgcaaacgccctgggctgggaaggccccaggcacactcaaggaacagaagggtggctagtgtgggttagaatggcaggaaaggaggtcagatcacaggggaccttagaagccttggtaaagcagctgagatttggattcagggtgttgacaagccctgctgaccagtctccactctgtattggccaggagactcttgcctccatcatggaggaggttcacaccagaagccagctctgcccttggagactctcttcccccagtgctcccctgaagcttcacactcaccagtctcatgctgcaccctgaccggcaggtccctagcatgagccccataatccctggggactgcattatcacagaccagtaataagaaggtaaacctacatccttgtggtgggggaggggaggcaaatgaaaacccatcttcctgaggcatttactttagattagcaaatcctggctgtgccagtgttttctgggctgtggggcagacacagattaattacatgtcaggcggcacctggaaaatgcctaccggacagctgttgtacacctggccagccatgaaggatcccaggcccaaggcccaccacccagcaatgctcagatcatcctggcaactgccacccgggatcaaggggctgcatgccttaactgccatcctcggctgccctgcttggagacctctctggcacattccttgttctctctgtgatttcttggcatatgactcaggctggttgcccccaactgcccaacctcttgaatcccattctgggtcttttccagctgccagcttcttccatggggatcttgtataacaagcctgcagtttggactcactgctgggcccttttgtgccatatagaacaagtcacctgctctgacttaattactgctgtatgtgtacacattcatgtgaggcaagtcacttctccaggctcagttaccacatctgtactatgagcatgttaataatactagcttccatattgagcactaactgttaattcattgaatcctgtgagtacatactagtatttgcattttttttttagacggagttttgctctgttgtcgcccaggctggagtacagtggcacaatctcagctcactgcaaccttcacctccggggttcaagcgattctcctgtcccagcctcccgagtagctgggattacaggcgcctgctaatattttgtatttttagtagagacggggtttcaccatgttggtcaggcttgtctcaaactcctgacctcagatgatcctcctgcctcggcctcccaaagtgctgggattacagacgtgagccaaggcgcccggccagtatttccattttttatgtgccggcctccacaggattgtggaagtgattaaattaattaatatgcaaagtgctttgcaacttgaaatttatctgataaaagcaattttattcaatattggggaattcagacagatgaaaattgtaattggcaatatttatggtgaccatcctcatgtaatgttgatttataaacatatatctttttatagtatagattgttccttttgtaaatgaatactgagggcctgttctgtgtcaggcactgttccaggtgcttaagatatgtcagtgaagaaaatcaaagattggtactcttatggggcttacatttttgcaagcagacagacaataagtaagtccattttgtatgcagtatattggaatgttgagggccgtggaaaagtcaaaaagcagagcagggcaagggggatcgtgagtacaggggaaggcggcaggttgccttttgggggatggtgagtgcagaggacagaggcatattgctttttgcggggattgtgagtgcgggggacggcggcaggttgccttttgggggatcgtgagtgcaggggatggcggcaggttgccttttgggggatcgtgagtgcagggaatggtggcagcttgcttttttggggatcgtgagtgcaggagacagcagcaggttgctttttttagtcggggtgagcctggtttgtgtttcaaatgcatggtcatgtcacttactcgccagacatttactgcgtgctcctgccatgtgctgcggcctggagatacagcagtgaacagtgagcagcctagagaagcagctcctcctggagcttactttctggcgggcagagtggacagtaaacaagcaggcaacgacgggtgataattgcaggttgaggtaagcagtatgaagaaataaacaaggtgatgtgagggcaaaccaaaggggcagcagatagagagatggggtggcccctccgaggcgacatttgagctgggcctgaagcacgagtctgagccagccatgggcagtgccggaaccgtgtgcatcaaaggccacagggccagaagagactgggcaggtagagtccgcccagggagcctgtgtgcctgagcaaaggcagcgcaaggagtgcagtgggagggaacgagtgagtctggagagtggacagcacagggccttgctgggcactgggaagggtctgattttatcctaagatcaggggaagtccgctgaagggctttgagcagggcttgacttgatctcatttgtgggtttgttttttcgttttttgttttgttttgttttgtttttttgagacagagtttcgctcttgtcacccaggctggagtgcaatggtgtgatcttggctcactgcaacctctgcctcctgggttcaagtgattctcctgcctcagcctcccgagtagctgggattacaggcatgcactaccacacccggctaattttttttgtacttagtagagatggggttttgccatgttggtcagggtggccttgaactcctgacctcaggtgatccacctgcctcagcctcccagagtgctgggattacaggcatgagccaccacgcccggcctcatttgtagtttttaaagatcaccctacatactggatgaaggataagccgcatgagcagttcctccatagccaccaactaggcagatgcagtcagttctcaagctaattccagctgacatttcttgaaccccctgccaggtgccatggaccacacttggtgcttttcaggcgcatcatctcattcactcttcactgcccagtttctgatttatccaggaagtaccaatgtaagctgtgattcactgtcttgcaggagaacccagaaacccagggtgcagaggggcagggagtggggagcggcagtgcagtgggggaggcggatttagatttaacaccagagcagcagctggtgcctcgtccattttaggacaactcattcttgtgattagctggaggttcactcttcttcagaagccagaatgtaaacggctcttccctgtgccgtcccccagaggtagcaatcaactgagaggtacagagccaccttccattcaatcagccagccctttgggttcacaaggaaatgacggttggcttttgaaaccaattcttgataagctcacccctaaaatgaaaattttcagggaacaggaaccctgtcctggggaactctgggacacatcattccccacagcattcagattaaaaataccttctattaatacattttggggccaggcacggtggctcacacctgtaatcccaacactttgggaggccgaggcaggaggatcatctgaggtcaggagcttgagaccagcctgaccaacatggtgaaaccccgtctctactaaaaatacaaaaattagccgggcatggtggcaggtgcctgtaatcccagctactccggaggctgaggcaggagaatcgcttgaacccaggatgtggagattgcagtgagtcgagattgtgccattgcactccagcctgggggacaagagcgagacttcgtctcaaaaaaaaaaaaaaaaaaatatatatatatatttgggggggactctgagtgtcagtggaatttgggtaaaacaagaaatagagacacggcactcaaaaggcttcagagagattctctaagcctgtttgccagatttcttaagcaagcaggtgcccaggcaagcttgatcctgagatgaacccaaggcacacgagctaccctgaaacactgctgcatttcaaaaagaaaaaagaaacccaggaccttttccccctttcatctttccaaacaagcaacctaaaatatttaactgggcccattgcatcattcatgaatctgacagtactcgttctcacaatcctatgtgcacgcaactgcaagtccagggccctaatgtttaccttttccagataataggtgaggttgtccaagctggcctccctctctgctgagtgcactccagcagcttcccgatgttggcctttagaacagcctgaatttcagttaaaaaataagcttcccctgtcacacgatgccttcttgaatctgatagcttaagtgcagtaaaatctgataaatgtagcttttctgtgcccgtttcaggccacatttagaaggcaacatcaacaggattttccttttcctagacacagctcaactccataaaggacttctgttttgtaatctgttttcgagatctgatgcgtgtgtttctaacaccccgtcacgtgaggaggtctgacgtagtcacccaacatgactttgagaaaatatactgtaaagatgtgtgtgggatggtacagccagctcactgaagcaaaatatcctttgtcggaaaactttccgcagggaataacagacctgcgcagtagatttcactttgatatggcccctgtgctggcccagtatggactgcaggtttgacttttgcaggattccaggtcagtatcctaatacagtgcgttctttttttagttaggttttatttctacgtttctttttatagaagacaacttgccatagatggaggagaaagttgctctgtcgattctgttgttattatgtacgttaggagctgcgtggccaagggctggcaagagggctcttggccttttcctctgattagaagattaaaaaaaatggggttcagtctggccctggagagtggctttgaataagtgacttgtagttctcactaagaatgtggactgaaaaggtttacttaactctcctctctgtaatgtcttagagctttactaataaaaatataccagattttactaacaagccctataaagatctgcataataggtgcattagttaacaatttaaagagatttttcaagattcgttttgcattgtaagaattagagtttatatggaaactatcattttaagttttcttctgtgcatttcagtaagatcgccttaactaattgaagggagagaagatttaattaagctggaaatactgggaagtagttaaagtcagattattgccaagaattgtttcccttattttcaaattcattcccagaatgagtgaaccaatacttaaaagcaatatccaggatagattactgtgatcaagctaacctttgagacttggaaggcaaggatgcaagcaatgatagattgattgtataaacaaattgtaggtagcaacctcaaagaacaattttcacctgtgtatagtgtggaccggactgttggtccgcctggtttttcagccatgttcaaactcaagaaatagtcattgcctcaaacttggaaaattaaggacaggtatggagagtatgcatatctgcatgactgtgggtgtgtctatgtttctgtattccttggcctccatctgtctcctgaggatttctgctttgtgtttcatcacatttttattcactgtctctttagtccttttaggcttatatatatttattttattgagtaaaataatttttaaataatttcttagaaaaattatttaattaagatttttaattaaaattgttttgacttttgttttgtttttttttgttttttttggttagcacagcagttctcaaactttttggtccctagactcccttacactcttacagtcattgggtatgcaaagagcttttgtttatctgagttctttctgtcaatatttaccatattcaacattttaaatgagaatgtaaagaactattagattgatgcaaaagtaattgcagtttttgccactacttttaattgcacctacctaatatttattaactgatggaaaatgactgtgataaatccaactgaataataaaataacattttattaaaagtaactattttttaaaacaaaaaaataatgagaggactagtactgttttacatgtttgcaaatattttaaagtctggcttgatagaaagacagctagattttcatctctgctcctgccttcagccgtggtatgctgttttagttgaagtatataaagcaaatccagcttctcacaaataggtagttggaaagggaaggaattttttaatagccttttcagctaattatggatattctttgatactataccaaaacttgacaagtgataatctcctaaaagtgtgtttttattagtaaatctttaagagattgcagagagaactgtgaagcaatcctacattcttagaactcgaaggcactttctcaaggccgctctctagggccagttcccctctgctcactctcaacatcaccaacaacggattgtcatgcctacaggtgcagggagtacaaagatgaatcagattgtccctgtactcaaggagctcatagggaagatataaatgtgaacaaatgcatgataccgtacattgtaatgatgggaaaccaaaaactagaaattccagaggaacaaggctatgcagataagacatcaactgagacaagaacaaatgaggattgccaggtaggggaactagggactgggagagaaggataatcttaagaggaaaaacagtttctctcctaaggctttattcaggcagaatgtagaagtcttccaaagttataagaaaagggacctatgacgagggagagtgtgtgctgtgtgtgcactgggggggcggggggagtatggttgtagggagtggggaggctaggatggagaaggggacttctgctttttaccttaatgcatatctgtgctgtttcagtctttgaccatgagcatagattcattttctttttctaaacctaggaaattctaaaaagcaagtgaagaaagttcatttcagtcatcaaaagtatctaaagtgcctctatttacattatatgtatgtgtttttattatataaggctgaagcatagcaggagacaaaaacagaaaattccaaatatgctaatttactagaatttcccagtggcatttatataaagtctaattataaaatatgtttatcagatatttatataattcttaaaagtactttacatattcgtacaatatactttatgtaaataaacacaaatgtccttataagtataatatataattttatatttaatttatataggctggctgtggtggctcaggcctgtaatccaagcactttgggaggccaaggtgggagggtcacttgagcccaggatttgagaccagcctgggcaacatagtgggaccccgtctctaataaaaaatttagaaattatccaaggatggtggcacatgtctgttgtcccagctactgttgagggatgggggaaagctgaggtggaaggatcactcaaacccaggagttcaaggctgtgatgagccatgacagcaccactgctgtccgacagcactccagcctgggtggcagagcaagaccctgtctcaaagaagaaaaaagataataaaagtaaaataatttatatagagatttgtttatatataaaatgctggatgaccattcatcctgattttttaaggtataatcccaatgtatacctatttccctggcattagtcttacctcctttctctctcaagtgtcctgttttggatgctgaattatatgttcatcctatttctacatctgtgcatataaaatgtatttaagtataatatatgtcagcatatttatatattcatgcttgtatttgcacatacatgtggctatatacacatgtgtaatatgcattttaaaaatatactttaggccgggcacggtggctcacgcctgtaatcccagcactttgggaggctgaggtggtgggcagattacaaggtcaggagttcaagacgagcctggccaacatggtgaaaccccgtctctactaaaaatacaaaaattagccaggcacggtggcacacacctgtaatcccagctacttgggaggctgaggcagaagaattgcttgaaccctggaggcggaggttgcagtgagccaagatcgcaccactgcactccagcctgggcaacagagtaagactgcctcagaaaaaaaaaaaaactaaaataaaaatatattttaaaagctattccagctaaaatgcaaactcaggaaaataatgacattaaagtccgatggccagttatccaattacaaattactttatgtttttaaaaatattgactcatctacaatttcatatctagaatatttttgttagcttttttatgcttatctattccatctcagtgaatttattgcacaaaacttgctttttagaaaatattttagaaagttacatgtaaattaaacctcatcttctttctaacttatatttctttttctgaaatctattgggggctttccattggcaggagctcctaagacttctgttttaagttactctttatgaagaaatgtagtggaggaggttgctttaaagtaactttaaagtcaacgaatactgtttttggtgaaaatgactgtccccctcccacatgagctcttttaaagtctaaattttcatcctggggatatccttcaagtaagtatgtctaagatctgtgggtccaatgttattttacttactgttcttatcagttacacaaactgaacctgccgaagaggccaggcaggccacattactgagagaagctgcctggtgataaatccttgggcaggcagtgtgtgtgtgttggggacacagccacttggcaccagtcctttttgccaggcaggctacaaccccagtgttgcctggtcttcctatttttcaaaaaaagctatattgattttttttgtgtgtgactgagtcttgctctgttgcctaggctggaatgcagtggcgtgatctcggctcactgcaacctccgcctcccaggttcaagcgattctccttcctcagcctcccgagtagctgggactacaggcactcaccaccatgcctgtctaatttttgtatttttaatagagatagagtttcaccatgttggccaggctagtcttgaactcctgacctcaagtgatccacccaccttggcctcccaaagtgctgggattacaggcatgagccaccgcgcccagccagctatcttgatttttatgttagagtttttcaacatggttaactaagattttcaaaaacatagttttaaaaatcacatgggtcaaacaaaacctgtggggaccggatttgctgcatggcttacagtgggcctcctttggtctgcagatttagaactcatttccttgttgcactttggacctgtgaaatagcttttagccgtagcactttctgagatcatccaatgagctggataactgtgctctaaagacagttttgacgatacttggtggttttgggagcgggcactgttaagattggagaggtggatactagagtcttaactttaaattgcttctccaacaagtttcactgctttttttcaagttccattcgcagatttggactctttgttttaagcagttgcattgactcctggattataaacttcttgagggcatgaaactctgactctgtctctttctgcctgaagttcccttttctcctcttgtccatatctgcagcactcaattccagcagcaggatccagtacataccacgtccttctgcctcccttactctctgttgaactcccataccttttccctgcatgcctgatcctggatgttccctgggtatctttgttttgcagtgtttcatgagcacatcttagttcccctgccaccctgcaaacctttgagtgtagaatttttgtttctcttatggcactgagttttagtgtcagcccttagaacggttctggctggttgattaaaaactacctgaaataaggtgctcctctggaacaaggtgggaaggagactttccaatgtttactttgtgtgctttttcaatttgataattatatgtatgtattacttattcacaagagaaattaaggtataaaaatacatatggattccagggtctcactccagctgttctaaaccagaatctctataggagcaggggaggtggaatctgtaaagctgtactatctgaatacctcccaggtgattttgatgcctgaccaggtttaggaaccaatgtctcaaagcacataataggtattcagtaagcattcgttcaaaggagggatgaacgcttgcctttcttttttctttttctttttcttttatttatttattttttttgagatggagtctcgctctgttgcccaggctggagtgcagtggcgcaatcttggctcactgcaatctctgcctcctgggttcaagcaattcttctgcctcagcctcccgagtagctgggactacaggcgcacgccactatgcccagctgattgaacgcatgtctttctatagcacttagctgatgccttctgcctagcaattgttcaataaatatttgttaagagaattaaattttgaattcagatgccatcaccacctccaacaccccatcccactttctttcttttttttttttcttttttcttcttttgagacggagtttcgctcttgttgcccaggctggagtacaatggcgcaatcttggctcaccacaacctccgcctcccgggttcaagcagttcttctctctcagcctcccgagtagctgggattacaggtatgtgccaccatgcccggctaattttgtattttgagaagagacggggtttcaccatgttggtgaggctggtcatgaactcccaacctcaggtgatccacctgcctcggcctcccaaagtgctgggattacaggcatgagccaccacgcctggcccaccccatcccactttattagctgggaagtggagtcatctgttcttccccaggctctcactctgtctggggtggatagctactttttacctggaccactgtgatggcctattggtctcctgcctgcagcctgcctccctctgagcctttcagcatactgcaggctgcgtgatttttttttaaaaaagctcaaatttcattataactctcaatggttccctattccctgcaatataaaatttaactgtagggagtcctttagggccctttatgatctggtctgacccttctttcccaagctctctcattcaacagatacatgctgaggcctgccatgtgcctggccccacatagacgctgtcgactgggctgcacacactactcctgctaccactcagactccctcattagcccctgagaacagtacccactttgatcatttttaatttttttttttttttttgcctatagtgttccttctgcttacagcatccttcctatacccctgttttacttatttatggaagtaatccagggcctctgtaaataattgtacttactcttctaacattttatacttatctccagtatatggcctgccatcatggattccaatgattagttgacagttctctttcttcccctagactctgggctccttgagagcagagacttgccttcctcctgttcatatctccagtataactctagcacccaagtactgtgtctgaccatattaacatatttgctggataaagttgttaaaaggtgtgtcaagaaggcaaatcaaggtgctacttattaactatgatttttaaaggctttctgacacacaaaggtagatatcccctctgaaaaatgtcatgcttggattttgcaaagttatgacaatattttaatgacatatataatgatatttattgtatatgttgttctgttaagtatgactacaatattattccatgttaagagttggccttttgctaaccatcctagttgaacaatctgagagaagaatcagaaccccacagaagtggttggggctttgtatattataaatctgagtcaggacaccctagagtgttcattagcctgatttgaaatgccgtattccgcaaatggaagcagagcctaaagggaggttcaggatgctgtgaagcagaatgttttggaagaagcagtagttttgaactggaaagacaaaatagatgatgtcagcatagacctaagccacctttttgaatcatatagcatgtgttttgtcagatctgaagctatctagtcaggctgataaagaattaaaataacatgtgggcttccaagaagccaaacatgataaaaatatatgagtcaggggagaaaggagatcctacaggggcccagagccgagagacttgaaagaaggcaaaagaaacatcagcaaagtatgctattgatctgtgacccagtgaaggacagactccttcactccggggtcaccctttctcccttcaggggcaaagaggaagtcataagattccatttcatttcattctagttttatttgtagaaataatcccccatacttctagaaaagattcatggaagattacagttaaaggcagggtaaacaagagcagaagaactaatgttaaataaagaaaatgaaacaataggcacaccagaaacccaggccaagaatagctacaacaattgatgataaaagttagttctgagcttctttgtcttgagaattaaaacagaaacatggtgaatatagtgttctcattatctgaattgaagaatttgttagtagaaaggtacttttttcctatgactggatacaataaaagaatttatcaaatggatccttgtataaaggacactaaataacataatagtcacagcttataatagcagctttacaaaaaggtagagaggttctttgtgtggccatctggtccatccaactaaataaatgccatgagctaaatgttatactttactgctaggaaaacattgccactgagagttaaagaagtatcatcaaactgtaaggctttctggagacgtctcttaatacagaatagcacagagagactggatgaatctctggttagtatgttctgtagaccagagggtttttttgtgtgtgtgttttgtttgtttgttttgctttacttttaactgcatgtggtgatctattactgggtagtgaaattagtgagttgctgtaagcattctttaaaagaaaaggctgggtgcagtggctcacacctgtaatcccagcactttgggaggctgaggcgggcagatcacgaggtcaagagatcgagaccatcctggccaacatggtgaaaccccgtctctactaaaaatacaaaaattagctgggcgtggtggcatgcacctgtagtcccagctactcgggaggctgaggcaggagagtcgcttgaaccctggagccggaagttgcagtgagctgagatcatgccattgcactccagcctggtgacagagcgagactcaatctcaaaaaaaaaaaaaaaaaagaaaagaaaaagaaagaaaagaaaaatactagagcagaacagaatgcatcacacctagtaagggtgagtgttaatttcatttgtgtcttaggtcactatgtactgtgtatctcttactgtgggaagtatgaaagctgctacttttcactgcccctcactataatatcagttagtaagctttagcacaccagactcatggaataggacttatatagagaatatagaaaatacagagaagaatggagatgggatcctcagaccagaacaagagccactgtgccttgaagttgtgctaattcaggaatctatgactagattcattcttgtccgttcttgtcaaaggacttagaaatgtcctttcctggttttacattttgtctcctttttagttgccttcagtacctgacagttctttttgaaaaccctagtctactttgtctctactaaaggggaaactagaaaaggaacctgatgagtcaccatagggccaatagcgcagagaggcgggggtgcccctggtggtcagacttggttacacaccctgcaactctagagattgacccttatgagccacaaattaggaagggctccttcagttcttgcttcttctctgagtgggcaatagctttgcatataggtaccacttaaggaaaattcatttaaaaaaatagcctgggcaacatagcgaaaccctgtctctaccaacaatacaaaaattagccgggcgtggtggctctcacctgtggtcccagctattcaggaagctgaggtgagagaatcgcttgagccggggaagtggaggttgcagtgagcggagaccacaccactgcactccagcctgggcaacagagcgagactttgtctcaaaaaaaaaaaaatcattttcctgcttcatggttgtgactggatcatcagatttctctttgaaaataggcaggaagcttctggcaggaccatggcattgcccagctctagtagttcaaagcagcagccttgaatgatgatgagacccttaacatttcagaaaaaaaaaaaaaacctcctcccctcccaaatttggacatgtatatatagctccaactttggagaaaaggggaaggagttctgggaggatttccaatgataacaactattagcaatggtatgagaaacaggctggggcaagaaaaagatttagcttctaatgttgactcttgagtctcgggagcatcaacagaatgagataaaaacctgaagtttcatacaaaagaacagtttttcacagaagtggaaaatagtctagagataaagaagccacctgtggaagattatctgaccatttctctcctcttgtttcagatgacagtcatgtccctttccagggacctcaaggacgactttcacagtgacacggtactctccatcttaaatgagcagcgcattcggggcattttatgcgatgtcactatcattgtggaagataccaaatttaaagcccatagcaatgttctggcagcttcaagcctgtattttaaaaatatcttttggagccatacaatctgtatttccagccacgtcctggagctggacgatctcaaagctgaagtgtttactgaaatacttaattatatctacagttccacagtcgttgtcaagagacaggaaacagtcactgatctcgcagctgcaggaaaaaagctgggaatatcgttcttggaagaccttactgatcgcaacttctcaaattccccgggtccctatgtattctgtattactgaaaagggagtggttaaagaagaaaaaaatgaaaaaaggcatgaagaaccagccatcactaatgggccaaggatcacaaatgcattttccatcatcgaaacagaaaatagtaataacatgttttccccgctggacttgagggcaagtttcaaaaaggtctccgactccatgagaacagctagcctttgcctggagaggacggacgtctgccacgaggcagagcctgtccgcacacttgccgagcactcatacgctgtttcttccgtagctgaagcttacagaagtcagcctgtacgtgaacatgatggcagttcacctggtaacacagggaaagaaaattgtgaagcccttgcagcgaaaccgaaaacatgccggaagccaaagacattctccataccacaggattcggattcagccacagaaaatataccaccccctccagtatccaacttagaggttaatcaagaaagaagtccacaaccagctgctgttctcactcgttcaaaatctccaaacaatgaaggagatgtccatttttccagggaagatgaaaatcaatcttctgatgttcccgggccgccagccgcagaggttccacctctggtgtacaattgtagctgctgttccaaagcctttgacagcagcactctgctcagtgcccacatgcagcttcacaagccaacccaggagcctttagtgtgcaagtattgcaacaaacaattcaccaccctgaacaggttggatcggcatgaacagatctgcatgaggtcaagccacatgcccattcctggaggaaaccaacgctttttagaaaactatcctaccattggacaaaatggaggttcattcacaggtccagaacctttattatctgaaaataggattggtgaattttccagtaccggaagtactttgccagacacggaccacatggttaaatttgttaatgggcaaatgctctacagttgcgttgtgtgcaaacgtagttatgtgaccttatctagcctccgaagacatgcaaatgttcactcctggagaagaacatatccttgccattactgcaacaaagtatttgcattggctgagtacaggacaaggcatgaaatttggcatacgggagaaagacgatatcagtgcattttctgtcttgaaactttcatgacctactatatactcaaaaatcatcagaagtctttccatgccatcgatcatagactttccatcagtaaaaaaacagcaaatggaggcttgaagcctagtgtctatccgtataaactttataggctactgcctatgaaatgcaagagagccccttataagagctaccgaaattcttcctatgaaaatgcacgagaaaacagtcaaatgaatgagtctgcacctggtacctatgttgttcagaatccacacagctctgaattaccaacgctgaatttccaagatactgtaaacaccctgaccaacagtccagccatcccattggaaacatctgcatgtcaggacatacccacttctgccaatgtacaaaatgcagagggtaccaaatggggagaggaggcattgaaaatggatcttgacaataacttttattcaactgaggtgtcagtttcttccactgaaaatgctgtcagttctgacctccgggcaggggatgtacctgttttatctttgagtaatagcagtgagaatgccgcctctgtgatcagctacagtggctctgcaccctcggtcattgtacacagcagccagttttcatcggtgatcatgcacagcaatgccattgctgccatgaccagcagcaaccacagagccttttcagacccagctgtcagtcagtccctgaaagatgacagtaagcccgagccagataaagtgggtaggtttgcaagcagacccaaaagcattaaggagaaaaagaaaactacatcacataccaggggagaaataccggaggagtcaaactatgttgctgatcctggaggatcactgagcaaaaccacaaatattgctgaagaaaccagcaaaattgaaacctacattgcaaaacctgctctgccgggaacctccacaaatagtaatgttgcacccctttgccaaataacagtgaaaattggaaacgaagccattgtgaaaaggcacattctaggatctaaattgttttataaaagagggagaagacccaagtatcagatgcaggaggagcctttgccacaggggaatgacccagaacccagtggagacagcccactcgggctttgccaatccgagtgcatggagatgagtgaagtgttcgatgacgcaagtgaccaggattccactgacaaaccgtggcgcccttactacaactacaaacccaaaaagaaatccagacagttgaaaaaaatgaggaaagtcaactggaggaaggagcacggaaacaggagcccgagccataaatgtaaatacccagcagaactggattgcgccgtggggaaggctcctcaggataaaccctttgaggaagaagaaactaaagagatgcccaagctgcagtgtgaactctgtgatggagacaaagcagtgggggctggaaaccaaggaaggccccaccgacatcttacttctcggccatatgcctgcgagctctgcgccaagcagttccagagcccttccacactcaaaatgcacatgagatgtcacaccggggagaagccataccagtgcaagacctgcggacggtgcttttcggtgcaaggaaacttacagaaacatgaacgcatccacctgggcttgaaggagttcgtctgtcagtattgcaacaaggcattcaccttgaatgagaccctcaaaatccatgaaagaatccatactggagaaaagcgttaccactgtcagttctgctttcagagatttttgtatctctccaccaaaaggaatcacgagcagaggcatattcgggagcataatgggaagggctatgcctgcttccagtgccccaaaatttgcaaaacagctgctgcccttggaatgcaccaaaagaaacacttattcaaaagcccaagtcagcaggagaaaataggtgacgtgtgccacgaaaactcaaatcccttggagaatcaacatttcattggttcagaagacaatgaccaaaaggataacatacaaaccggtgtggaaaatgttgtcctttgagtggcaagaattagaaaaatcttcaaaaatatagttggtggtttttttagttatgatttaagtttagtttcattttgtccatgtgacagtcatgaaggagtgaaattaaaaaaaaaaaaaactcatttgtgaaaattccagaaaaaggatcctaatatctactttgggttttagcattaactttatgcaaagtgcacaaaaacaaaatagctgactcctccaatatcccaagtttcttgtgaaagttaataaaattcttagctgtggtatttctaccagtgaaaaaaggagtttaattttagcctagtttaaaactttctaataattgctaataagaactggctgctgaactgtctttagtcactggagaaaataagggtcagatatcctgaagatggcatcttcgtaaatatgttacgtggtaataagctgtgtgacggtctttattcccatctggcttctgcactattaaaatttgtttaaattaatggatacacatgaaatacttaaacaatataactgaaattatgtgcataatgagtaacctaaagtaggacattcatacattatgtagaactacttttctgcaacacaaaccttgtaaaatacatatataaatcactataacttttaactgtccatatcccctgtagagaattatgaggagcaatagatctgcaaataatgaggactgatgtaaaaatcaatagaaagcattttgaatatgatttaagagcatgtgaatgcttttagatggaatgctgttcccttgaagttatggctgagctgttcttagaactggtctactcaattcacagaaaacataggtcatgccttatctatgggggaacaccctcccagaatttacctgtgattacctgtgctgcatattactttgcaatggcctcatctcagagaatgaaagagggtcacattgttctgaaactctctgcagtcttccaaccaccacaaggccatggatgtgggggtctattccagacagacttaagggctcaagtggaacctgccatctcccattccactgaaggactgtccaagagatttagtgcaaggtacactgcagtagtgaattcccaggcacttgaaagtgactgcctaatccctacaattactagccttgttggagattatgcagcccacaagtacagactagtataaagcaaaaggacaaaggaacccccaccctccaccccacccattaatgacttgagtgggcaagaagaagtgatggccttccttgcctaaaacagtagctttgtttttagggggtgggaaggtaggatgtggagtgacatggttctatcctttacttatgagactcagaaatatatctacaaagccagatgctctgtcttcatatttgcagacatctagaccccttgctaaaaacccactgaagttttttttttatgttctttgacccacaccatcaacactaccctcaaatctaattgccctacagcatattctatcatgtggactaggttcctggaaagccggaactcatgattctttttcaaactgccagaatagaagggagagagaaaacatttctaccctttgatcaccagtgtgaacagaatccggaatgcagtttcagcgtgacctgcagtcattcatgttcattggatttgacagatggaaacccaaggttatcgaagattggaaggttatcattgtgaagaagtagctcaaaggactccggtttctgtctacaagtgtgatgtctccatgaagaagacttagtatggatttgggtgggtaagaaagcatttaaacgcccaggaaaggacatgattaaagttgaccttttaatactgtagtaccttgctgttaagtaaccccactattgtatctgcatttatcttttgttcatctactttcacttacatacagtattatataagtagagaaaaatgggaaaatgcaagcaaattcaactttattttatacattgtatatatgtacaccctacactattcatttgggttttattaaagagatagtcacaaagggcttacgaaaatcatttttgaattgataattagaatattgaataagcaatcctatgatccactaatttgttttatcagttaataatattaatcaaagacatttactgtatattctagtcattttgatttgagttaaccccaaatataaaattacctgtagtgatgtctctctcccagcccttatatgtggatattttttaagtggacttgtatgctgataattctagaccaaagtaaatatggcagaatatttatacatgaaaaaataattttgcaaatattttctataattgtattcatttaaaatgttgatagcttgtgttagtttcagggaggggtgtatattttgataaaaaaatacttgactttgtaattctgtatattctatacaatttatagcagagccgttttaagacagccttgtcacatttttttgttaattgtgaaaattttattgagtgatgtttaagtatgcattgagtacatgaccaactagaattaaagtaagtgtaaacagtgaacatactgtatgctgtacaagatataatgtaacttgctgttttagcatctgtattttggttagaagatattattaaatgcagatgttaaggattggaaaagtctaattttatttttagaaataatggatataaatttgtttttgcttgattaaaatagcttattcctacattaagtctctttttaaatgttttcatgttatttcttttgtgcagctatttcatctgtgtgagtcacagctttgtttccacgtattattcagtttatttctgtttccttacttgtttacattccgtggtacctacttacatgcttaggagtcaaatggattatgacattaggaaaaaagcagaataaaagagattgaagtcttctgatgattgagtgttttggataggcctgatcttataatgataaatcagagaatgaaatgctctccaggaagcattctgctccactcatccgtgggaaacaaattacatttattgagtaccaggcactgggcaatgtctttacataggctatttcattaacacacacgcaccagaattcgacctcattatcctcgttttatagtgactttgagaaggtctcacaaccagacaaagccaggatgctaacctaggtctgcctgactccaaagcccatgtttttgttccttctcaacactgtagagaaaaatcatttatagaaactgaacagagtatgaggaaaggagatatgataaagtaatgcagctttaggatggcagttagtgactgccctggaacaggattaaaggaggctgtgtcaggttcagcttcccctgaattgggcttcccttatatctcaggagattgccctataaaatcagtaaaatttgtgcacttttttaaggatatggagtaaaattgtaatagcattataagctggtaattttcacacaaagaaaaaaatacgttccgtcgtcacagactctactcctaaacttagctaactaactatcttgcaaatgcctgcagtttgtcccagtgggcaatgtgagaggggatgtcggtggctcaggcagcacagtccatcaccaacacagagaaaattactgccaggcctaccggtggctggccagtagcatcaattttgtattggaagggcaatccaaaccagattcaccaaaaatttgataactgttatctgctaaaactaacttcattatgtacaagaacaacagatttaatattgaaagcatctgtaacaattgggaaagtaaaagcataaaacaaaagtgttagtatatttttttccattacttcggatactttcattcttgctactcatcttttctcatcacctactgattgatttagttgcactcccatctgtctcttatcagtttatttttacagaagcaacagctcttccacttcagtttcctccaaatctgagaatgcatccccctcgccctccccaaatcctgaccagctattgatttctcttctggagagagaagcctcctttactccctccctagtttgtacatcctaacccagttcctcaagcaagatggtcagtgagcaagaaagttggctgggtgtgcaatttagaactattcactctaaatttagacaacgaatgaagaactagttagaaatgttatattttattatttcattagtaacatctaaaacattctatttagaatgtttttgtggaaaatcaaacacttttttgcaataattttaaaatatatgacttgtatgtaattataggtgaaagtattttattccagttagagaaactggtaaacagacattttaaagatgtaataatgtggccgggcgtggtggctcacaactgtaatcccagcacgttggaggccgaggcgggagttcaggaatgggctggccaacatggtgaaaccccgtctctactaaaaatacaaaactttagctgggcatagtggtgggtgcctataatcccagctactggggaggctgaagcaggagaatcacttgaacctgggaggcggaggtgtagtgagctgagatcgtgcctctgcactctggcctgcacaacagagcaagactccatctcaaaaaaaaataataatgctaacttatgtaaaattgtaattaattcattcaaaatatacttaatttttactgctgaactaggactacagagatgtgaggtagcttgtgcctttgaggaacttaagtctggtgaaggagattgatgagacaatagatgattataaaacaaaactctgagctcttaagaggcctagaaccaaagcagagagaagtgatactgagcgggggctggtggagctgggcttcaccagaggcgtcgggtccagagaggagcaactaaaacaaaggagccaccggggaatgtaggttgttccaaaagtctggcgtttgggatgatgaacctggagaggcacatgggacacatcatcagggccttggctttgccagagttggacctctatcctgacagcataaggcagtgggcaagcaaagaagggggctgggtagtaagagatgaactcagagagagttaacacaatatccaagcaagatgagaagcctttggaggacttcagcagagagtggaaggatctgatatgcttacaaggatcactcttactgcgtgtactgaatagaccacagcccggggcaagggtggaggcagggagatgagataggagactgtggcagcacaggcgggagatgacagtggcttggaagagggtgggagtagtggggatggtaagaaatgggtcacattctggagatagatttttaattttgtaatgtggaaattttcaagcctatgcagaagtagaatagtttggtgaaacccagtgtacccatcattcaacaatcaacaattcacagccaatgttgtttcatcaataccctcacctactttccttctccactgtattattttgaagcagatcatagacatcataccatttcatctgtaaatatgtcagtatacatctctaaaaaggtaaacaacatttttaatataaccatatcattaccattccttaaaaattaacatttccttaatatcaagttccattcgttaaaatttctggttgtctcatcattatatatatattttttacaattggaatcagaatccaactaaagtcccatactacaattagttgatatacctgtcttataatctatagattttctattttttcccttcgcaatttcattccgaagaaattcggtgttcacagtctaggaagaaacaaggcaacttcttaggttgggttatgttcttccgttaggaggtacactctgtgtggcttagatattggatgtattttgaagacagatctgatagatttgctaatggtgtagataccaggggttgaaaaagagagggatcaaaaatgacaccaaggtttgggcctgaacaattagaaggatggtgttgccaacaaactagatacctgggttggaagttcagaagaggagactgacttgaggtaaggatttgaaagttgtattttattcattcaaaatatatttgaggtgggagtacagcacaagaatggccaaaacaaatagtccctggagcctgtgacatagtggggaacacaaaaggctaaaaagctgattatttacaaccatactaaatgctatgcagaagggctgcatggtgctctgaggacatctaatggaggaatgtaacctagttgggaggttcaagggaggctgtctttgaggaagtaactttttgttttcagacctagacctgaggaagtaacttttgagctgaggtctgaaagataaataagagttgaaaggagagagagtttctaggttgagggactaacagatatcaagggcagcctgtggagggaacacagttctttggaggccagtggtggccagagtacagagaaattgatttaaaatcagactagaggacaggagccataccatgcagaaccttcaaggtcatgccaagaatttggatcttattcttaagatccagaagatcttaagagcatcagaaagccattgaattatttaaagcaggttgggacaagaagaggtatatttaatcagttttgtattacaaaaaagtcactgtggctgaaatgtagacaatggcttggaagacagtagcggccagaagtagagcagttaggaagctactgcagttgtgcaggctagagattatagtggcttggatttgttaactggaaaaaccttaaacaagttaaatgtaacagagtttaattgagcaaagaaccatttgtgaattggggacccctaagaaccagaataggttttaagaactccagcctacaacgtagtcaggcagcatttataagaagaaaatggaagaagtaaggtacagaggcagcttcatgggctacagctcactgttttgccttatgtcaatcagtcagctgtctgagattgactgaagctcagctgctgaactgagactcagctgttagtttaggcatttagttagtttatgcaactaagtaaggttgcagttcattttggacttgagtatgaaggcatccttaggccaaatttagtttagtttaactgatgatgtgattgcagtgaagatagagagaaaggggaggatttgggagatacttaagggagagaatcagcaggacgtgatgtttgatgatatatgggaagtgagggctagggatggatcaaggatagtctttgggttttagaattgttgaagctaggagtgcaaggtgtcccgtccatgaagcttgtatagagaaggaagaatccagaaaacaccaacacaaatgacccctgacttctgaggtttccacttacaactttttgacttcatgattatgcaaaagcaatacacattctgtagaaaccatattttgagtacccatacaagcattccattttttactcagtacagtattcaataaatttcatgagctattctacactttatcataaaataagcattgcattggatgagtttgcccaactgcaggctaaagtaagcatttgacccacatttaaggtagactaggctaagctatttggtagattttttttttttttttttttgagatggaatctcgctctgttgcccaggctggagtgcaatggtgcgatcttggctcactgcaacctccgcctcccgggttcaagtgattctcctgcctcagcctccggagtagctgggattacaggcacgtgctaccatgcccggggaatttttgtatttttagtagagatgggtttcaccatgttggccaggctggtcacaaacccctgaccagggggttaaggggcttgcccaggccagacaggaccaactctgagccttttggtctccaagacactgttttcatccccacctacttattccacattgactaaggtattttttggaagaacctagagctaaaacaataaaaaatactgtcctttcctgaaaatgagtgtttattggcctgagactctaatactttcagagacctaggtcattcctttttttattcgacatattctgtatggcaactagtactgccaggcgctattctaagcatctaatgaagattaactcatttagtcctcatatcaccccatgagggaaacactattatcattgccaacaatgtttagtttggttatctttttgctgcacggtgtcacaaaacagtggcttaaaacaaccatttattattatttcacatggttctgtggtttgactgggatcagctgggcagagcctctcacgcagttgcagttagatggtgatgaggctggagtcatctaaaggcatgaccaggctggcattaaagcagccacagcccacccagtttcaaggggttgaaggtgtagactccagtcctcagtgggggagtcacagacacttacagggagggaaggaattgatggcagccatcttcagaggtaagctacaacgacgggtcattcccaatgagaaaaccaagcacagagaagttaaattacttaccaaaggccatacagctggtatgtgaataaacagagttcatcccaggcagttgtgttccagagcctgctaggagaggcaaaagggattggagctcaatagcgcagcacggactctcacagcagagtcagagtgtgaagagcacagcattattcatagcagaactggagagtcctagagtcatccatcagggatcggtgaaaaggaagaaattctaaaaatactaggaaatgtcaaggactgcctaaacaaggctgttattatgttggggggtgaaaatatggtctcatgtggcccaaggcaagtggaagccttcatgctttcatttatcttttcaatcaagaaaaaatgaaaatatgagtgttggggggcaggagtgggtggggtatgtgtgtggtatttttccttataaataattaacatctggaacctttagtcagatactcaaaggggtcatatacgggagaaactaaggcttggaccagggagttaaaatttgcagtgcagaccagcttcagaaggtatcttcaagctcctctgctaaacgtctgggtcatcgatgaccttatgcacatttgctccctctaatggaaggacaaggaaatgacatgtctacttcagaaaggttagtcacatcacaggagtagtgggtattgccagaaataagccgactcacctctggagtggttggtttctctctggaactctagcgacctgagacagttgggtagcttaggccattttcgatgtctagcttctcagaacttctgggtcagaaagggaggttccacacattgatttggacgtgctcgacatctgcgtgagtgtggtgagtggaagagcatcaggccatgtcccaggtctttccaaatcagactccattatttctgacattcctcttcctaaagaccagaggtaggaattcagggccgccattttcgtcgtctcttatcacgatgggaatcagcgttctctgctgctgctcctgctgaacacgacgacattccagccaccgggaactgctcgggactcagtatcattctcagacctaggcaggagcgttccgtgcttgccctcctccacaggtgccccgccgcacggggcaaagagtctgcagggccaacagggatgtgcccccgcaatgtccacgccatccccagagaccgcattctggtacccagaacctgagaattccctgcagactttcaaggcctgttctggccgcttccttgccagtgccacacccctggggcagccaaagggcagctgtttgcaggggttgtggaccgagtttgtgatggagtttcagcgtccacatgtgtgcctgaggcccctagcagcctgggagggagcagggtgaggggaggaggggatgggagaagatctggcccacctcttcccctgctgtctcgttcctgcaggaaatgccagaaactaggaattccacattccaacacggtcttccagattgctgtgaaagtatatttgtcaagggaggagaacagaatatatttaattaagaacttgctagcctggtttataccttttaaatatttagacacatgatatatacgcctccatctgtacacttgctccccgccttgcgagtgttgagggggcggctgtcatcactctccaaaatgcctggcttctcatcacgctgtctgtgtatacaagctcctgaccatgctgaaacgttcatgcccatccctaccccagccccatccacagacgtgatcatttctcaatacctaattcaaaggccccatcaaaagcctcttccttgcagtgttgtgtgagacagcccctcacgcctctgcttgccttgacctccagccccaccacagctctctggattcagccgttttcaattctgcctctgccgtcagccagcgagctcctcccggatgttcccagcatcagcatgctgcggtcaaatgcaagtcat

SEQ ID NO: 2384 - DNA, 4085 bp, Homo sapiens
atgacagtcatgtccctttccagggacctcaaggacgactttcacagtgacacggtactctccatcttaaatgagcagcgcattcggggcattttatgcgatgtcactatcattgtggaagataccaaatttaaagcccatagcaatgttctggcagcttcaagcctgtattttaaaaatatcttttggagccatacaatctgtatttccagccacgtcctggagctggacgatctcaaagctgaagtgtttactgaaatacttaattatatctacagttccacagtcgttgtcaagagacaggaaacagtcactgatctcgcagctgcaggaaaaaagctgggaatatcgttcttggaagaccttactgatcgcaacttctcaaattccccgggtccctatgtattctgtattactgaaaagggagtggttaaagaagaaaaaaatgaaaaaaggcatgaagaaccagccatcactaatgggccaaggatcacaaatgcattttccatcatcgaaacagaaaatagtaataacatgttttccccgctggacttgagggcaagtttcaaaaaggtctccgactccatgagaacagctagcctttgcctggagaggacggacgtctgccacgaggcagagcctgtccgcacacttgccgagcactcatacgctgtttcttccgtagctgaagcttacagaagtcagcctgtacgtgaacatgatggcagttcacctggtaacacagggaaagaaaattgtgaagcccttgcagcgaaaccgaaaacatgccggaagccaaagacattctccataccacaggattcggattcagccacagaaaatataccaccccctccagtatccaacttagaggttaatcaagaaagaagtccacaaccagctgctgttctcactcgttcaaaatctccaaacaatgaaggagatgtccatttttccagggaagatgaaaatcaatcttctgatgttcccgggccgccagccgcagaggttccacctctggtgtacaattgtagctgctgttccaaagcctttgacagcagcactctgctcagtgcccacatgcagcttcacaagccaacccaggagcctttagtgtgcaagtattgcaacaaacaattcaccaccctgaacaggttggatcggcatgaacagatctgcatgaggtcaagccacatgcccattcctggaggaaaccaacgctttttagaaaactatcctaccattggacaaaatggaggttcattcacaggtccagaacctttattatctgaaaataggattggtgaattttccagtaccggaagtactttgccagacacggaccacatggttaaatttgttaatgggcaaatgctctacagttgcgttgtgtgcaaacgtagttatgtgaccttatctagcctccgaagacatgcaaatgttcactcctggagaagaacatatccttgccattactgcaacaaagtatttgcattggctgagtacaggacaaggcatgaaatttggcatacgggagaaagacgatatcagtgcattttctgtcttgaaactttcatgacctactatatactcaaaaatcatcagaagtctttccatgccatcgatcatagactttccatcagtaaaaaaacagcaaatggaggcttgaagcctagtgtctatccgtataaactttataggctactgcctatgaaatgcaagagagccccttataagagctaccgaaattcttcctatgaaaatgcacgagaaaacagtcaaatgaatgagtctgcacctggtacctatgttgttcagaatccacacagctctgaattaccaacgctgaatttccaagatactgtaaacaccctgaccaacagtccagccatcccattggaaacatctgcatgtcaggacatacccacttctgccaatgtacaaaatgcagagggtaccaaatggggagaggaggcattgaaaatggatcttgacaataacttttattcaactgaggtgtcagtttcttccactgaaaatgctgtcagttctgacctccgggcaggggatgtacctgttttatctttgagtaatagcagtgagaatgccgcctctgtgatcagctacagtggctctgcaccctcggtcattgtacacagcagccagttttcatcggtgatcatgcacagcaatgccattgctgccatgaccagcagcaaccacagagccttttcagacccagctgtcagtcagtccctgaaagatgacagtaagcccgagccagataaagtgggtaggtttgcaagcagacccaaaagcattaaggagaaaaagaaaactacatcacataccaggggagaaataccggaggagtcaaactatgttgctgatcctggaggatcactgagcaaaaccacaaatattgctgaagaaaccagcaaaattgaaacctacattgcaaaacctgctctgccgggaacctccacaaatagtaatgttgcacccctttgccaaataacagtgaaaattggaaacgaagccattgtgaaaaggcacattctaggatctaaattgttttataaaagagggagaagacccaagtatcagatgcaggaggagcctttgccacaggggaatgacccagaacccagtggagacagcccactcgggctttgccaatccgagtgcatggagatgagtgaagtgttcgatgacgcaagtgaccaggattccactgacaaaccgtggcgcccttactacaactacaaacccaaaaagaaatccagacagttgaaaaaaatgaggaaagtcaactggaggaaggagcacggaaacaggagcccgagccataaatgtaaatacccagcagaactggattgcgccgtggggaaggctcctcaggataaaccctttgaggaagaagaaactaaagagatgcccaagctgcagtgtgaactctgtgatggagacaaagcagtgggggctggaaaccaaggaaggccccaccgacatcttacttctcggccatatgcctgcgagctctgcgccaagcagttccagagcccttccacactcaaaatgcacatgagatgtcacaccggggagaagccataccagtgcaagacctgcggacggtgcttttcggtgcaaggaaacttacagaaacatgaacgcatccacctgggcttgaaggagttcgtctgtcagtattgcaacaaggcattcaccttgaatgagaccctcaaaatccatgaaagaatccatactggagaaaagcgttaccactgtcagttctgctttcagagatttttgtatctctccaccaaaaggaatcacgagcagaggcatattcgggagcataatgggaagggctatgcctgcttccagtgccccaaaatttgcaaaacagctgctgcccttggaatgcaccaaaagaaacacttattcaaaagcccaagtcagcaggagaaaataggtgacgtgtgccacgaaaactcaaatcccttggagaatcaacatttcattggttcagaagacaatgaccaaaaggataacatacaaaccggtgtggaaaatgttgtcctttgagtggcaagaattagaaaaatcttcaaaaatatagttggtggtttttttagttatgatttaagtttagtttcattttgtccatgtgacagtcatgaaggagtgaaattaaaaaaaaaaaaaactcatttgtgaaaattccagaaaaaggatcctaatatctactttgggttttagcattaactttatgcaaagtgcacaaaaacaaaatagctgactcctccaatatcccaagtttcttgtgaaagttaataaaattcttagctgtggtatttctaccagtgaaaaaaggagtttaattttagcctagtttaaaactttctaataattgctaataagaactggctgctgaactgtctttagtcactggagaaaataagggtcagatatcctgaagatggcatcttcgtaaatatgttacgtggtaataagctgtgtgacggtctttattcccatctggcttctgcactattaaaatttgtttaaattaatggatacac

SEQ ID NO: 2385 - protein, 1189 aa, Homo sapiens
MTVMSLSRDLKDDFHSDTVLSILNEQRIRGILCDVTIIVEDTKFKAHSNVLAASSLYFKNIFWSHTICISSHVLELDDLKAEVFTEILNYIYSSTVVVKRQETVTDLAAAGKKLGISFLEDLTDRNFSNSPGPYVFCITEKGVVKEEKNEKRHEEPAITNGPRITNAFSIIETENSNNMFSPLDLRASFKKVSDSMRTASLCLERTDVCHEAEPVRTLAEHSYAVSSVAEAYRSQPVREHDGSSPGNTGKENCEAAKPKTCRKPKTFSIPQDSDSATENIPPPPVSNLEVNQERSPQPAAVLTRSKSPNNEGDVHFSREDENQSSDVPGPPAAEVPPLVYNCSCCSKAFDSSTLLSAHMQLHKPTQEPLVCKYCNKQFTTLNRLDRHEQICMRSSHMPIPGGNQRFLENYPTIGQNGGSFTGPEPLLSENRIGEFSSTGSTLPDTDHMVKFVNGQMKCVVCKRSYVTLSSLRRHANVHSWRRTYPCHYCNKVFAEYRTRHEIWHTGERRYQCIFCLETFMTYYILKNHQKSFHAIDHRLSISKKTANGGLKPSVYPYKLYRLLPMKCKRAPYKSYRNSSYENARENSQMNESAPGTYVVQNPHSSELPTLNFQDTVNTLTNSPAIPLETSACQDIPTSANVQNAEGTKWGEEALKMDLDNNFYSTEVSVSSTENAVSSDLRAGDVPVLSLSNSSENAASVISYSGSAPSVIVHSSQFSSVIMHSNAIAAMTSSNHRAFSDPAVSQSLKDDSKPEPDKVGRFASRPKSIKEKKKTTSHTRGEIPEESNYVADPGGSLSKTTNIAEETSKIETYIAKPALPGTSTNSNVAPLCQITVKIGNEAIVKRHILGSKLFYKRGRRPKYQMQEEPLPQGNDPEPSGDSPLGLCQSECMEMSEVFDDASDQDSTDKPWRPYYNYKPKKKSRQLKKMRKVNWRKEHGNRSPSHKCKYPAELDCAVGKAPQDKPFEEEETKEMPKLQCELCDGDKAVGAGNQGRPHRHLTSRPYACELCAKQFQSPSTLKMHMRCHTGEKPYQCKTCGRCFSVQGNLQKHERIHLGLKEFVCQYCNKAFTLNETLKIHERIHTGEKRYHCQFCFQRFLYLSTKRNHEQRHIREHNGKGYACFQCPKICKTAAALGMHQKKHLFKSPSQQEKIGDVCHENSNPLENQHFIGSEDNDQKDNIQTGVENVVL

SEQ ID NO: 2386 - DNA, 324 bp, Homo sapiens
atgaagattgatggatatcagttaagcaaaggacattgtgtaaatattgagcctgggaaagccagggacttgagctcaatttttagagggttattcatgctagaggaagaagaatgccctttccagagccagttcttggggaaaagaggaactgttgatatagccagagcccgaaaagaagattactctgcaacagctaaaggagctttgtttcctgatctataccagcagaggtacagatcaatccaggataattatcctcagcccctgttggttgaagataccaggcaagctgggaccgacacagaaaatggaccaatatct

SEQ ID NO: 2387 - protein, 108 aa, Homo sapiens
MKIDGYQLSKGHCVNIEPGKARDLSSIFRGLFMLEEEECPFQSQFLGKRGTVDIARARKEDYSATAKGALFPDLYQQRYRSIQDNYPQPLLVEDTRQAGTDTENGPIS

SEQ ID NO: 2388 - DNA, 4821 bp, Homo sapiens
acagaagccctctagccaaggcctcgggcagccctaccaaatgaatatgggcacttgagttttctaggagggctttcctgctgccctgggtctcatccaactggtatccatctaaacattcccacccagggttattcatgctagaggaagaagaatgccctttccagagccagttcttggggaaaagaggaactgttgatatagccagagcccgaaaagaagattactctgcaacagctaaagcctcacgaaagattttacttgtagatcaactttcaaaatgtaggaagtcagaatgggtgacatcatcagaaaaatatgtggagctgatcacaagaagtgaagaacccagagcacgaaagcggttgtgactcctgggcccagggagttgacagcgtctgggcttcagaggagccagcgcctccgagttgtcttgaagtgaggctctgctgtagtcctgttcttctggctctaagatctgaatgttgtgaccactaatttgctctttcctggagagtaaccccagtttggtccacaaggcttgctgcccaatctttgccaacagttgaaccaagactctgaggctgatatgcaatgtcacttacaacattaatcagatactgcatttaagatcttgatgtggaagaaatggaggactcagaaccaaggatttccaagtgatttcttccaaagcacaggaatctcactctgttaaagctggtctgttctaactgagatgacagtcatgtccctttccagggacctcaaggacgactttcacagtgacacggtactctccatcttaaatgagcagcgcattcggggcattttatgcgatgtcactatcattgtggaagataccaaatttaaagcccatagcaatgttctggcagcttcaagcctgtattttaaaaatatcttttggagccatacaatctgtatttccagccacgtcctggagctggacgatctcaaagctgaagtgtttactgaaatacttaattatatctacagttccacagtcgttgtcaagagacaggaaacagtcactgatctcgcagctgcaggaaaaaagctgggaatatcgttcttggaagaccttactgatcgcaacttctcaaattccccgggtccctatgtattctgtattactgaaaagggagtggttaaagaagaaaaaaatgaaaaaaggcatgaagaaccagccatcactaatgggccaaggatcacaaatgcattttccatcatcgaaacagaaaatagtaataacatgttttccccgctggacttgagggcaagtttcaaaaaggtctccgactccatgagaacagctagcctttgcctggagaggacggacgtctgccacgaggcagagcctgtccgcacacttgccgagcactcatacgctgtttcttccgtagctgaagcttacagaagtcagcctgtacgtgaacatgatggcagttcacctggtaacacagggaaagaaaattgtgaagcccttgcagcgaaaccgaaaacatgccggaagccaaagacattctccataccacaggattcggattcagccacagaaaatataccaccccctccagtatccaacttagaggttaatcaagaaagaagtccacaaccagctgctgttctcactcgttcaaaatctccaaacaatgaaggagatgtccatttttccagggaagatgaaaatcaatcttctgatgttcccgggccgccagccgcagaggttccacctctggtgtacaattgtagctgctgttccaaagcctttgacagcagcactctgctcagtgcccacatgcagcttcacaagccaacccaggagcctttagtgtgcaagtattgcaacaaacaattcaccaccctgaacaggttggatcggcatgaacagatctgcatgaggtcaagccacatgcccattcctggaggaaaccaacgctttttagaaaactatcctaccattggacaaaatggaggttcattcacaggtccagaacctttattatctgaaaataggattggtgaattttccagtaccggaagtactttgccagacacggaccacatggttaaatttgttaatgggcaaatgctctacagttgcgttgtgtgcaaacgtagttatgtgaccttatctagcctccgaagacatgcaaatgttcactcctggagaagaacatatccttgccattactgcaacaaagtatttgcattggctgagtacaggacaaggcatgaaatttggcatacgggagaaagacgatatcagtgcattttctgtcttgaaactttcatgacctactatatactcaaaaatcatcagaagtctttccatgccatcgatcatagactttccatcagtaaaaaaacagcaaatggaggcttgaagcctagtgtctatccgtataaactttataggctactgcctatgaaatgcaagagagccccttataagagctaccgaaattcttcctatgaaaatgcacgagaaaacagtcaaatgaatgagtctgcacctggtacctatgttgttcagaatccacacagctctgaattaccaacgctgaatttccaagatactgtaaacaccctgaccaacagtccagccatcccattggaaacatctgcatgtcaggacatacccacttctgccaatgtacaaaatgcagagggtaccaaatggggagaggaggcattgaaaatggatcttgacaataacttttattcaactgaggtgtcagtttcttccactgaaaatgctgtcagttctgacctccgggcaggggatgtacctgttttatctttgagtaatagcagtgagaatgccgcctctgtgatcagctacagtggctctgcaccctcggtcattgtacacagcagccagttttcatcggtgatcatgcacagcaatgccattgctgccatgaccagcagcaaccacagagccttttcagacccagctgtcagtcagtccctgaaagatgacagtaagcccgagccagataaagtgggtaggtttgcaagcagacccaaaagcattaaggagaaaaagaaaactacatcacataccaggggagaaataccggaggagtcaaactatgttgctgatcctggaggatcactgagcaaaaccacaaatattgctgaagaaaccagcaaaattgaaacctacattgcaaaacctgctctgccgggaacctccacaaatagtaatgttgcacccctttgccaaataacagtgaaaattggaaacgaagccattgtgaaaaggcacattctaggatctaaattgttttataaaagagggagaagacccaagtatcagatgcaggaggagcctttgccacaggggaatgacccagaacccagtggagacagcccactcgggctttgccaatccgagtgcatggagatgagtgaagtgttcgatgacgcaagtgaccaggattccactgacaaaccgtggcgcccttactacaactacaaacccaaaaagaaatccagacagttgaaaaaaatgaggaaagtcaactggaggaaggagcacggaaacaggagcccgagccataaatgtaaatacccagcagaactggattgcgccgtggggaaggctcctcaggataaaccctttgaggaagaagaaactaaagagatgcccaagctgcagtgtgaactctgtgatggagacaaagcagtgggggctggaaaccaaggaaggccccaccgacatcttacttctcggccatatgcctgcgagctctgcgccaagcagttccagagcccttccacactcaaaatgcacatgagatgtcacaccggggagaagccataccagtgcaagacctgcggacggtgcttttcggtgcaaggaaacttacagaaacatgaacgcatccacctgggcttgaaggagttcgtctgtcagtattgcaacaaggcattcaccttgaatgagaccctcaaaatccatgaaagaatccatactggagaaaagcgttaccactgtcagttctgctttcagagatttttgtatctctccaccaaaaggaatcacgagcagaggcatattcgggagcataatgggaagggctatgcctgcttccagtgccccaaaatttgcaaaacagctgctgcccttggaatgcaccaaaagaaacacttattcaaaagcccaagtcagcaggagaaaataggtgacgtgtgccacgaaaactcaaatcccttggagaatcaacatttcattggttcagaagacaatgaccaaaaggataacatacaaaccggtgtggaaaatgttgtcctttgagtggcaagaattagaaaaatcttcaaaaatatagttggtggtttttttagttatgatttaagtttagtttcattttgtccatgtgacagtcatgaaggagtgaaattaaaaaaaaaaaaaactcatttgtgaaaattccagaaaaaggatcctaatatctactttgggttttagcattaactttatgcaaagtgcacaaaaacaaaatagctgactcctccaatatcccaagtttcttgtgaaagttaataaaattcttagctgtggtatttctaccagtgaaaaaaggagtttaattttagcctagtttaaaactttctaataattgctaataagaactggctgctgaactgtctttagtcactggagaaaataagggtcagatatcctgaagatggcatcttcgtaaatatgttacgtggtaataagctgtgtgacggtctttattcccatctggcttctgcactattaaaatttgtttaaattaatggatacac

SEQ ID NO: 2389 - protein, 1189 aa, Homo sapiens; identical to SEQ ID NO: 2385

SEQ ID NO: 2390 - DNA, 4691 bp, Homo sapiens
ggggagtggcactcgcagctgcagcaaatctcaaaataaagaggcaacggcctttctcttcctctccatctccctatagcacaccttttatttcttttcttcttttttttaagcctcacgaaagattttacttgtagatcaactttcaaaatgtaggaagtcagaatgggtgacatcatcagaaaaatatgtggagctgatcacaagaagtgaagaacccagagcacgaaagcggttgtgactcctgggcccagggagttgacagcgtctgggcttcagaggagccagcgcctccgagttgtcttgaagtgaggctctgctgtagtcctgttcttctggctctaagatctgaatgttgtgaccactaatttgctctttcctggagagtaaccccagtttggtccacaaggcttgctgcccaatctttgccaacagttgaaccaagactctgaggctgatatgcaatgtcacttacaacattaatcagatactgcatttaagatcttgatgtggaagaaatggaggactcagaaccaaggatttccaagtgatttcttccaaagcacaggaatctcactctgttaaagctggtctgttctaactgagatgacagtcatgtccctttccagggacctcaaggacgactttcacagtgacacggtactctccatcttaaatgagcagcgcattcggggcattttatgcgatgtcactatcattgtggaagataccaaatttaaagcccatagcaatgttctggcagcttcaagcctgtattttaaaaatatcttttggagccatacaatctgtatttccagccacgtcctggagctggacgatctcaaagctgaagtgtttactgaaatacttaattatatctacagttccacagtcgttgtcaagagacaggaaacagtcactgatctcgcagctgcaggaaaaaagctgggaatatcgttcttggaagaccttactgatcgcaacttctcaaattccccgggtccctatgtattctgtattactgaaaagggagtggttaaagaagaaaaaaatgaaaaaaggcatgaagaaccagccatcactaatgggccaaggatcacaaatgcattttccatcatcgaaacagaaaatagtaataacatgttttccccgctggacttgagggcaagtttcaaaaaggtctccgactccatgagaacagctagcctttgcctggagaggacggacgtctgccacgaggcagagcctgtccgcacacttgccgagcactcatacgctgtttcttccgtagctgaagcttacagaagtcagcctgtacgtgaacatgatggcagttcacctggtaacacagggaaagaaaattgtgaagcccttgcagcgaaaccgaaaacatgccggaagccaaagacattctccataccacaggattcggattcagccacagaaaatataccaccccctccagtatccaacttagaggttaatcaagaaagaagtccacaaccagctgctgttctcactcgttcaaaatctccaaacaatgaaggagatgtccatttttccagggaagatgaaaatcaatcttctgatgttcccgggccgccagccgcagaggttccacctctggtgtacaattgtagctgctgttccaaagcctttgacagcagcactctgctcagtgcccacatgcagcttcacaagccaacccaggagcctttagtgtgcaagtattgcaacaaacaattcaccaccctgaacaggttggatcggcatgaacagatctgcatgaggtcaagccacatgcccattcctggaggaaaccaacgctttttagaaaactatcctaccattggacaaaatggaggttcattcacaggtccagaacctttattatctgaaaataggattggtgaattttccagtaccggaagtactttgccagacacggaccacatggttaaatttgttaatgggcaaatgctctacagttgcgttgtgtgcaaacgtagttatgtgaccttatctagcctccgaagacatgcaaatgttcactcctggagaagaacatatccttgccattactgcaacaaagtatttgcattggctgagtacaggacaaggcatgaaatttggcatacgggagaaagacgatatcagtgcattttctgtcttgaaactttcatgacctactatatactcaaaaatcatcagaagtctttccatgccatcgatcatagactttccatcagtaaaaaaacagcaaatggaggcttgaagcctagtgtctatccgtataaactttataggctactgcctatgaaatgcaagagagccccttataagagctaccgaaattcttcctatgaaaatgcacgagaaaacagtcaaatgaatgagtctgcacctggtacctatgttgttcagaatccacacagctctgaattaccaacgctgaatttccaagatactgtaaacaccctgaccaacagtccagccatcccattggaaacatctgcatgtcaggacatacccacttctgccaatgtacaaaatgcagagggtaccaaatggggagaggaggcattgaaaatggatcttgacaataacttttattcaactgaggtgtcagtttcttccactgaaaatgctgtcagttctgacctccgggcaggggatgtacctgttttatctttgagtaatagcagtgagaatgccgcctctgtgatcagctacagtggctctgcaccctcggtcattgtacacagcagccagttttcatcggtgatcatgcacagcaatgccattgctgccatgaccagcagcaaccacagagccttttcagacccagctgtcagtcagtccctgaaagatgacagtaagcccgagccagataaagtgggtaggtttgcaagcagacccaaaagcattaaggagaaaaagaaaactacatcacataccaggggagaaataccggaggagtcaaactatgttgctgatcctggaggatcactgagcaaaaccacaaatattgctgaagaaaccagcaaaattgaaacctacattgcaaaacctgctctgccgggaacctccacaaatagtaatgttgcacccctttgccaaataacagtgaaaattggaaacgaagccattgtgaaaaggcacattctaggatctaaattgttttataaaagagggagaagacccaagtatcagatgcaggaggagcctttgccacaggggaatgacccagaacccagtggagacagcccactcgggctttgccaatccgagtgcatggagatgagtgaagtgttcgatgacgcaagtgaccaggattccactgacaaaccgtggcgcccttactacaactacaaacccaaaaagaaatccagacagttgaaaaaaatgaggaaagtcaactggaggaaggagcacggaaacaggagcccgagccataaatgtaaatacccagcagaactggattgcgccgtggggaaggctcctcaggataaaccctttgaggaagaagaaactaaagagatgcccaagctgcagtgtgaactctgtgatggagacaaagcagtgggggctggaaaccaaggaaggccccaccgacatcttacttctcggccatatgcctgcgagctctgcgccaagcagttccagagcccttccacactcaaaatgcacatgagatgtcacaccggggagaagccataccagtgcaagacctgcggacggtgcttttcggtgcaaggaaacttacagaaacatgaacgcatccacctgggcttgaaggagttcgtctgtcagtattgcaacaaggcattcaccttgaatgagaccctcaaaatccatgaaagaatccatactggagaaaagcgttaccactgtcagttctgctttcagagatttttgtatctctccaccaaaaggaatcacgagcagaggcatattcgggagcataatgggaagggctatgcctgcttccagtgccccaaaatttgcaaaacagctgctgcccttggaatgcaccaaaagaaacacttattcaaaagcccaagtcagcaggagaaaataggtgacgtgtgccacgaaaactcaaatcccttggagaatcaacatttcattggttcagaagacaatgaccaaaaggataacatacaaaccggtgtggaaaatgttgtcctttgagtggcaagaattagaaaaatcttcaaaaatatagttggtggtttttttagttatgatttaagtttagtttcattttgtccatgtgacagtcatgaaggagtgaaattaaaaaaaaaaaaaactcatttgtgaaaattccagaaaaaggatcctaatatctactttgggttttagcattaactttatgcaaagtgcacaaaaacaaaatagctgactcctccaatatcccaagtttcttgtgaaagttaataaaattcttagctgtggtatttctaccagtgaaaaaaggagtttaattttagcctagtttaaaactttctaataattgctaataagaactggctgctgaactgtctttagtcactggagaaaataagggtcagatatcctgaagatggcatcttcgtaaatatgttacgtggtaataagctgtgtgacggtctttattcccatctggcttctgcactattaaaatttgtttaaattaatggatacac

SEQ ID NO: 2391 - protein, 1189 aa, Homo sapiens; identical to SEQ ID NO: 2385

SEQ ID NO: 2392 - DNA, 95375 bp, Mus musculus
  misc_feature (1)...(95375): n = A, C, G or T/U
accagaatcaacattcccattttggcatggaggaatgggggcatagcaagggaagatccaacaagaagactgaaactgagaagggaaaacgccaactctcttagctctatgtccagtgtctatggctcctgatacaatcatttgggcttaacaggcatggatggctcaactcttccagctcagctgcctacagtacacatagcctctctcttggctgggtttcgtaggggcgctctgacagtcctggcatcaatatcttgggggtgtctactgttaatttaagctttaccttaacagcttcacagagggcatcccagagcctcatcctaaggactgcaaccccgccacacattgcctagtttgacgacagcttccatgatcgtttccatctttcatccttctaaagccagtaccacttgaacagcactggaagtgcttccggtagcttgaaatgtggaccgcaggtgcagcagcctgaggtcttcccctggggactaccttctagtaaggcatccatctaaggcattctcagcttcttttcaaatgatcttgcattttcccaagtctgacccttcagtgggtgggatcttgtcctcagcacattttcggctgttcctaaaacaagacattcacagttttcgactttctgccctttctctaaataagagcggcgagcagctgggcgtggtggcacacgcctttaatcccagcacctgggaggcagagacaggcagatttctgagttcgaggccagcctggtctacaaagtgagctccaggacagccagggccatacagagaaaccctgtcttgaaaaaaccaaaaaaaaaaaaaaaaaaaaataagagcggcgagcacttgccagtctgaaagcctgccatcctcctttgcagttttctctgccaaacacagcagatcttcacttctaggttcactcttggtcatatctcaggacactggcaagaatgaaaccagaatcttcgtaaaatagaactcgaatagcttctagaccagttctgaatagagacctcatgttcaattttttctcttcactctagtcttccagactcccacctaaatgacacagtgagtgttgtttacagcattgttatgccaatactttcctctgagatctaaatattccatcccgcaggcacgccccgtaaattggaaggtaaagaacaccttcaggaaatccttcaaactgaccacattcaccaagcccctttcccaacagagtgagtgaaccgacctgagcttccttttcagatgcacgaatcccagctgcaaggaagaatcacagaagagcagacggggcaaaggcgactctgaggtaaggccagctgcctgaaagaagcggaaaccagccaagcaaccgagtcacctggcaagcacactctccagcctctcgagctacctgcctgcaggctctgctgtgacctccagatcttcaggcttttgagctgtcacccacgctggggtggactttggtgatgcggctgtctttaagtcatttctgcttctgtaactcctctcctctaagtaactctaacaaaactcactatttcccaagttggatttggataggatctttattgtactttggtgtgttgtgggattcctctctggggtaagtagtgtgttgtatctctccaggaaaaaaaaaaaaaaaaaaaactgtcacacaacaagcatccttgatttttgtaaaccaaagttccaaactctttcacatttctcctaaaaacaacttcccaaggcttaagaaacatgtgattgggctggagagctgcctctggggttaagagcactgactgctcctacagaggttctgagttcaattcccagcaaccacatggtggctcacgaccatctgtaatgagatctgatgccctcttctgctgtgcctgaagacagcgaccgtgtattcacatacataaaaataaattcacaaaaagaagaaacatgtgatcacttttatcacaaccctacttcctagcaccatctttctgcctgagttactcttcttgcttctgtgtgacacatcatacaaacagcaactgaaggaaggaagggcttgcttggctcacagtttaaagatacagtccatccccacagagcatcaggcacctgcagtcaggaagcagagaacaatactgctggtgttcagcttgaattctcctttttattcagctcacgaccacagtcattgtcagggaagacaggaggtggggtgggtggggggtggttaattcttttgttttttgttttttttttttttgttttttttttggttcttcaagacagggtttctctgtgtagccctggctgtcctggaactaactttgtagaccaggctggcctcgaactcagaaatccacctgcctctgcctcccgagtgctgggattaaaggcgtgcgccaccaggcccggcttggatggttaattcttaagtaggtagagagttaaggaaagcagtggtgccgggttgaatcctgggtagcttaacttacttctgtttgtttggttggttgtttgattgattatctaaaagaaattctcttttggaaaactccttgttttccctaccccagggtaactaacttctcaataattccaaaagtcccctcccttatcttatctgtctggtttctgttatttaaggtgactccacccacaaagtgcattccgacccaattcaaggaggacaaaagagagtcagttcagagctgctcagtataaaaaaatctaaagggtcaaacatggaagggagacaacaaaaggtgctttagctctagatcgcatcctgtgctcagtgtgtgtgtgtgtgtgtgtgtgttttctttgcgatgaattttggccgtctactgtgtactgtgcaaccttcttgttttacctgatagagaatagactcaagaaaggagagctatcggacaccatatgaaatggtacttcctgtatttatagtgggtctcccgccttgttcagtccgatcttaagactctctcacaggcatgcctacaaatttgtcttctaggtaaatttagagccttctaattgacaatcagcaataaccatcaaaatcacaaaaggataaatgataaaaaggagcacacaggaaatctccagatcttgtgctgtgtattgagttcatgaatgtttaaaagacaaataataaataaataaataaataaataaataaataaataaataaataaataaattggtggcctgaatgagaataaccctcacaggcttgtatatcagattgtttgtccctagttggtaaaatttgtttgaaaaaaaaaattagtgaaaaagcaaaataaatttcatttgtcctcattttgaggacctgacctgatttcaaaacaggccataaggcaccagcttcaggagtggactaccagtcccagaccagtcccagaccagtcccagaccagtcccagaaacagttataaagcaccagctctaggaacagacgataaaatccagaacaagatcataaaacgctctcccaaagaacagcccgaggagaaccacaaaaatggggaaatatcttatctcagtaggggacacctgtgctgggcagccctatgtcatcacatggttgaacactcatgacataggaatatagaccactgaccacctgtgaccccctaggacccaccaataaaatttgagattacctaatccttttatagagcgtgcgtgcctttgtctggggttgccatttcaaagaatggttgattcccgcatgctggttgttcctgcaaaatagatgctctttgtttttgcatactgagtctggggtcttccttcaacgattttcagacccttacattaggaggtgtggccttgttgggggagttgtggtcactggggctgggggctgaggttttcaaagcccacaccattcccagtttcctcttcctccccgacaactcatgcttacagatgaaagctctctagggccaggcctgcctgcctgctgccttattcccaaccatgacagtcggtcatggactcattctctgaaacttttagcaagtccccacaaactctttttttttctataatttcccttagaaattgtagaataaaaggtccaagcctcctttgagatttgaagactttctaaaacccaccaatccctgagcccgaaaatcccggagcacaaaaatcccccaatccctgagctctaaactccattaatccctgtgtttggcctgaaatctcaccaatccccacccaagaaatctctacccttggaaaactcctcccccaacaaaccctaagcaagtctcctgctccgctccctgctgcctctcacctgagcagaggccgtctcccgctgtggctctcccaagaaatcttgtgtgtgaggtttgttgtgtggtgtgactctgtggcgctccttggctcccaaccgccagaatatcttcctcttgggagttgttaacacttccactggggaaaccttacccctcagaacgctaacacctcctttggagaagtcttccccccagaactgtaacacttttattgggaaagttttttttcccctcagaactgttctatcatggcagaggcaaagtacttaacactaagggcattgtataagctgatgacggtggtatatcaggagctaaagataatggttaatccagttgtgattatccggtatcttacatatgaaagaaacaaggaaagagcggagctggacaaggccgcttgccttttttcttttagccactgtttttaggctccctctgtttgtctaatcactcatccttaaagcctccttggttatctactttgcggcaggctttaagcagaatgtcggaagcactggggtgaatcagacggtcctaaagcttcactgtcctaactgtacgacataaatattcacaagcatttcagttggtctgtttttgttttgttttgttctgttttaaagaagggagccagtgccaggtgcaagaatgtgatctgacaaatcccagagggcttacaagatgtcagaaccaagtgctgtgggattttgaaagaaaagccaggacaaatatatatatatatatcattgtaccttgcaaaatgaacaagaaaaatgtaggattgttacaaaagctataaagatgaaaaagacaactttgcccttgaagcgctcctatcttggagctggggacaggagaagcagcatcaagggtaggacagacagaagacacactgcagagcatctgtcaagcctggagtaaagaaagcttcctggcaatgtgatacttgcaggctgaaatgcatgctggtggttcctggggcaagccagcatcagggaagagagtctgcaggtggtgaacccagtgctggggagaataagctgggctcacttcaggggttctgtggctgataatgtcctgtcccagggccagatgggaagagtgaaatgaggtgaatgaggcagaccatccagtgaggcagggcagtagccttgatgatgtgtcagggttttgtttatttgtttgtttgtttgtttgtttttggtttttggttttttttcctgaagaccaccaagacacctggtagagatgatggcaccaaactgaagagaacaagatctaaatgtcaaggcccttgccctgagccatcctatgctgtaggtcaagctgggcagtctattcctgttgaagacaggttgccctacataccctgtctcctaccctgtcacaaatctccttccagcaagctctgcactccaaaatgccacagaactcacagcttttcctcagctgccataaaaccacaccgagtgcttctgcaagaccaagaaagagtccaaggtttgacagccggcacctgggcagtagacagcaaaccaaaacctggagaagaggccggaaaaggctggttcatggttctcatatgtccacttgttacattgtgctacgtaaatctgtatggatgaaaaacctaaaagagattttagacacaatcttatatacattctacctcaggcatgattcttcctcattccaaaattctaatattacagattttggtctcttggtaaacagcttaaggaaaagacttactgaatattcactttgtaacatgctacaacatgaaaccacactcagaagaatatcttctttcccactgtggtggtttgattggaaatggccccaatagactcacagggagtggcactactaggaggtgtggccttgttggagtgggtgtggctttgttggaggaagtgcatcactaaggggtctcaaatgctcaagccgggtctagtgtgccgttcactacccactgcctgctgatccgggtgtagagctctctgctgtctctacaaacatgtctgcctgcatgttgccatgtttcctgccatgacaataatggactgaactgaaagcaagctctagttaagtgttgtcctttataagagttgctctaatcatggtgtctcttcatagcaatagaaacccaaattaagataaagaaggcgaggctggagagatggctcagcgggcaagaacactgactgctcttccaaaggtcctgagttcaattcccagcaaccacatggtggctcacaaccatctgtaatgagatctgatgccctcttctggtgtgtctgaagacagctacagtgtacttacatataataataaaaaataaataaatctttaaaaaaaagaagtgtttactccaagaataaactaacacattgaagaaaaaaaaagaccgagaaggctaaaaaggaaacatgagattaaaactgagatttaaagctatagccaaacaacagctatatgtccatgagatgttgtgtgttctttggaataagactatactgagttcatcagggatttattttagatccactccttggcagttaagaatttcttgtatatatgatgccgattagcaaaatcccaagattcagaagcttaaaaatcacaatcattttcttagcatttccacagttgagagaatcagtgtggcttagtttatgtctctgattcaggtgtcttgaatgtattcaagacatcaaaaggatcgaagcctgactggaagtctcagccaaggaaggggatgtgctacctagctcagttccatggctgcaggcctcaatccttcaccaagtttccccacacaatacctgacttcctttgtggggggcaaaaggcaaaagagcaagagagatgatgtgtgcccagagcctggagccttttccttatccaatcccaggagggaaagacagcatgtctgtcttactgtgttctatttgtgaaaagcaaggcagtctagcctgcatttccgaggaagggagacagaatgtggcaatccagggtcaaagattatcagaggccagtttataggcttcgagcttcagtttaaagaacatttggtcaggtgatccaggccattcctcaaatggcaattgttccttcttcttgtgcggttgtttcctctgaattgaaacattctctcagagaggtttactaagactttttctttttcttctttttttttaaactaaaactcaggaagctaataaaacttagaaggctcggaaagctcatgaaagttacaagattcacaaggctccttctcgagcttgtaaaagctggagcatgcaggctcttctgatcgctagctgtgcacagagctccacttgctctccatcccgggatgggctttttagtgatatctctgtgcctcccgtgcttctataagtaacactaatggatcaccaaaataggcttgggtggaattatttccaccatagataccctatgtggaatgaacagatacttgttcacatttcaaacttggggacacaccatacctatgctattcagggggtggaagatttgggggaactttagtgatatttgggggtgccattgtgcccatttcttgatacccaaggcaagtcacaaaggcttgtgtagagaacttatctggcacacaggtatgtatttgggggagcagtttctcaaaatgtgacccttgacccttcctcaccttgttctagagctattgtgaagtcttccagaaagaaggaagaaatgagtgttggcagttgtattggggtccaggtagaaaaaccatcagccggggatggtatttttttttcagggtttattttaagtgtatgagtactttgcctgtgtgaatgtatgtgtgttatttacatgcctggtgctgatggaagtcagaggaaggcatctgatgccctggaactgatattctggacagctgtgacccaccatgtgagtgctgggaactgaaccctggtcctctgcaagagcagcaagtactttgtttgtttgtttgtttgtttgtttgtttgtttgacacagggtttctctaggtagccatagctgtcctggaactcattctgtagactaggctggccttgaactaaaagatctgactgcctctgcctagtgaatgctggggttaaaggcgtgcaccacccactgcctggtttaaccgtctgagtcatctctccagtccttgaaaagtcttgcttaagttcctgtttgctgagttttcctcggttctcatttcacgatgtccagctctgttagcaccacagccgtggtcagagcacgtactccagaaatgtcctggggagggaggggactcggggggacaaggaaatgtgtgcatgggtcacattcccttcagcagctcttctgtgcagtcccaagagcagagacacacaggtacggagagacagacatgcagatatagatgaagcagcccaaataaaaccaagagcgccacaaatacttgctcagaatacccctctgccacaccactgagctgtcctaatcgacaaagcatcattgactgcctggatctctgaagcagcttccaagctggccagtgctattcatccatctatccatcctgccactggattatctttctggacagcaaatctgtgaaggtcaagaggcctgccaaactgatcttggggaaaagccaagccctttggatgctctccaagaccctaagtacctactctcgtttcatcttacctcctgttttggctccagtcataccacaggctgttacaggtacctaccatgagactatgatgtctctgcatctagcagctcattcatgcagacacttccacaaggaaacattctcaaattgccctccccagtctgggagaggtaccctggagccttggtcaacacatttccctcacagggctgaattacaggtgcttatcttctgtgtacatggggggaaaaaaaaggacactttctgaggggtgaggtcagttaagactatggaatggacctaatgtcaactctggcatggaaagcaggatgccctggcctggaaggaagccaacttggaggtacagagcatccctcgctctggccacgccctcttatctctgcgctctggttaccgagggagccgccatccttcagcgctctcggtagccctctgatcgatgatccttctctcgggcctcaggtggtcaggggaaaagcaccatggagcaggtgctgcgtgaaattggattctgaaagatgagttggagtctggcctcagaaataaagtgtggacatgtgtgtgcctaaggcaagggggtatattaaagcattctctttcccagtcgttgtttcccgcaggccttcaatacaggctccaaagctatctggcgaccgtgatgtctcctctcttcatccccgcccctagggacacccaccgtggctctctaggcacgcttgaatgaatgggggaggacccatgcgcatgaatgagcgcgtgtgtgagcgagtgtctaggctagccagtccgcagatgagtgaatggcgtccgcgccacttcggcccaggggcgcgggcgagggttccacttccctttcccgccagctggtggcctccagaaggtggcagagccggcagcggcccgagctgggacggccggggcgcgggatggtgggggaaggggcgttcccggcggccgcgccttccgcggctattggattagtggccttcagggatgagctcagccggatcggctttcagctgcagcctccgggccggccgggaaggcggggagcgagcggccgtggaggaggagggggaggcggcggctgcagcatccagagctggccctggcggtcggcgcgcccggcgcacaaaggcgctcagcccctggggaaggcaatgagcgcacagctgcccgggccctggccaccactgcagccctcgcggcgtgtgctcagtgctctagggaagaaacccggtgctccggggacgggcggccgaggtgcggcccgtgtgccctgagcgcgggactcgtcgctctccaggtcaggcgccaagctttagggccatcagggcaagggcttccgcatctcgctgagatcagcgcagtggggcacttcactactcgggaccggacctcggcggcctctcccgagcgtcaacttctccaagaacgtccctaactccagggcaccctgcggagcgagagggcgctgccgccggatacaagtcgagaggacgcgccgctggttgagaagcagcagccagcatccgcggggtcgctcgggcgcccctgcgtgggcggcagtggcagcagacctctctcccgggagtcccggacctgccagcgctggggattcctcccaggcaggcgctcgccctctcttttatggtaagtgttctccagctcctgctaaggggtgatcgtccgccagtaccggtcacactcggtgctcttgggggactctctggttccggtccgtgggaatgtctctgtgaattatggcattccgaactggttggtttgcgcccagcctcgggcgttgcgttgaggtcagcctctggtactgtaggtttgaaaccgctgctctccctgtagtggagacaacacacacaaattgaacccagactcaaccgactatgttccggtcgtatatccgtcactctctggggtgaccttgggccaggtgccacaaccacggtttcctcatccataagatgggggtgatagtgtgcccttttttactagagtgttggaggaactgctggggtggtgcggagacccgcgtctggcattcagaaagcacttagatactaactagcgttattagccttgtgagtccaagcacatcatccaatttcgcagagctgcctcatctgagtggcgaggactaatttctgggggtctgctcgtctgtggcttttggagctgtgggagtaaagcgtctagcactcagcagccgctggtggtgattgttcgtctccgacgctggggcagggaagactgattgccgggtccgggagtcgctcgcgcacggttcccagcctggctgcgagacaaacttggagagaataggtggctccggattctgctctgggaagcagggaggaggaagccaaagcccggagtgcggcaaataagtccaggaaaaacaagggaccccaaactcccggctagaaaggcccaggaagtgtgattcccaccgccccgtggccaagcgagagctgctgagtcaagaagagagaagagagcacgtttgtgtggctctatctagaactttcagtcctgcagtcccgggcttggatttgaattcggctttcagctccatcccgcggtgtgaccttgagcgattcttctaaggtccgctgctctgtgcttcccctcgccctcctcccctccccctttcttccccttctcctggttcctctccctccctactccaggaattggtgtgaacatctcttatccttccattcatctgcccctaacagttgttgagcctatctagatttagaagagataaggggaaagttcacttcccactgtgccctgtggaaagcgactaacccctgaggcttcctgtctgtttcctcactttggcacctctgtctttcaactaaagcctgcagtttctattgctcagggtgatggaggatctttcaacctcgctgctccactcgctctcccaattggttttgggctgcccgataaaccctctatgcagaacaacaaaatgtcaaaagtgtggtatagacatcctttacagacggccacagtttttgagacacacaccctgaatccatgtttcagatttccacagcaaggacggtaaaaagaatttaagccacttctggcaagctgcgaacaaaattagattcaccagctatgccatgcaaatatctcttcagttttcatttctcttcgactttaaggatattcagtgacatagaaataaaatctgcaaggaaaaaccagaagaagtcaaaagtcacggcagagctgggaaagaaatgctacttactgcagtggcttcgtagcttccaattgggaaccgatttggggtgtctgtgtgctgggagtggaacctagggctctgtgcatacaagataagcactccacccctaagctctagcctcagcttaaaatgtataaagaatcaagacaaggaagagccccaaaggacaaagactacagacaatttacccagagagagtgaaacagaaataacacatatgcgccttacctcaataagaaaaacgtgtgctaaagccagaagattcagtttttcagatatcagattggcaaatagtaatggccattcactagcaagaaggatttatcctcaaaaatgtaaatagtccaaattcctttctaaagctagaacttcctcgagactactaggagtgaagactgggcctgccctctaggcctggctttcactgaccccaccttcttttctgtcacttcccccttccccacccctgaaaccctggcctaagatcttggttttgctccaacactccagggcttattcctttcctgacttccattcctaccccaagttggtcacaggatcggaaccttgtcatggaagcatgtcccaggatgtggctaaggctcaggcctgaggcaaggtctttgccctttgagagaaagacccagtcaacacccccatgctccagttaatttttttctaagccggctggctcagctggctcgccgccacacatcggtgctcctgaaagggccctcctctgttggcacggtaacaaaagatctccaggagctccctagatagaacaagaaactggatgtggaaaatcaggaggttagagggacctagctaggtccattagaagtctttcctggtaatcatttttttttttttcaaaaaaaaaaaagtacttaatgtctgcacttaacttgtgtgaacatgatcactcatacttggcaaaaagatcaataataaaaaattaagaatctagcagcacatttgaataaaacatggtccctccatgtggggggctgcctttctttcctgctgctgctcagaaacaggcatcggttctgaagttgcagaaagcatcagttaggcctatcctttgggaaagaccccagctgagctgtcataaactttgtggagtgttgattgcatgggaatcttgctttgcacattgaatttggaacttaatccacgtttcaaatgtatacttcaattgtgaaaaaacaaaacaaaaacaaaaaccttgatggtaaaaacacaaattattcagtccaacaaccttttttttttggagatggctctcaccttgcagcccatgcaggactagacctcacagggtagctcagactggccccaaactcttaatcttccagaccctcctcccaagtgttaggactgcagtacctggctctggcaagtatgttgctgcagacaggtagtgtgtccaggactgatttaaaagacgggtggcaattagtggggcattggcttctaggaatagcacgtgatgcaggaggcgtcagtgggactaaaacttttagaatgacatcgtggggcagaaagatggagggaggatgccgaggtgggcacacaagagtgagagatgtaggcagtgaaagtgaacaggtcccagacagaagcttggggtagaagaaggtgagctgacttgagagtctggtgtcactggttggagaaagactacaagaagaggttgactgtgacacccttgggtgtcagctcaaaggatgcttgtttgagtgagcaggcggcaaggtgggtgggttaggaaatcacaggccctcactaggagactgctttagtaatcctgctaaagcagtgtggttctcaaccttcatcctgctgcttcagggacttttaatacagttcctcgcggtatggtgacttccaaccgtaaaattatttgagttgctacttcataactgtaattttgctagtgttatgaatcaaaatgtcaatatctgatatggagggctgctgatatgagacccctgtgaaagggtcatgagacccccccaccaaagaggtcatgacccacaggttgagaacccctgtgctaaggtgtaaagtaagaggaggtagatattactgagaagaagccatagatagagtggaacctggatcatggagatggcagaggctgagctcagcccaggacacatggttttcacgttctagtggaccccagatgtgccacagcgttgagaaggtagacaggtgttcagtgggaagcttaggatggaaagaaaacactacaaagtcatttaaagagcatctagagtggccagaggctaagtgagggagggcgggctggtcaggagacatcctcagaaggctagtagggcaagttttaagaaaggatacacagaaaggaaggaagaggcagagcccaagatgtagccttgtggtggtgttgtactaatggtacgggtaggaaagttggtatagacactctactttcccaagggcagggcagcggcagcggcgtctatctgggttgtgatccggtgaactgtgtttatggtgaaccgcaatctctgccttttccaagaatgagtgaacttggcccagttcgctggcccataaagacatcccacctgtgagccaaggtctgtaagtgagggagtgattgagtcctaaggatgaagcacttccccctcacatgcggggcccctcccacctcgcatgggcccctcccccttcctgcatcttcctttctccttcccctttccaggtctagtattcaacacacacccacaaagatacctcaagtttaccagagatattcatgagtccgcattgcagtcctctggatttaaccatgatgcctgaatggtcctgcttttccagaaaacctgttttcaagcaagccattacaaccagtgagttatgctcatcttgggagataaaagacaggttggacctgcagactagtgggttcttttagtagacattttcttagagggtcccactggcagtacactcctcagattgtgtttccgtgctttgcctcagcttgaaccaatgctgggcctcacagaggacagctgtcctgcaaggaaacgagccacaggcacctggggcagccacaccattgaccaggactgctcactgccccactggatttgtcctaggtctctttcaaatgaccttggcaagcaggcgggcctggttaccacccagcgagcctcctccctctcagctcctgctcttgctggctgacagctgagcttttatccctggagccttggactctgtgtgggaggaggattcccatggaaaccccaggaggaggcgaggctggggaagcctcattgattgagccctaggaagatggggcccggcaggaggcaggagtcggccccacctgggctggacagatggctgcttttaagagtgctgggagagaaagaggtggaccagttgtagcatgagctccctgtgtgcattatgggaaaatctaatggacatctgtgattaaagccctgggggttccagagtttattcactgttagtgggttcattctgagcgaccatcttttagtaaaatacccatccaatttagtgtttgtagcaagaaaagcttacgaatggtccatcggccttctaaccaggtgggcctccttagccctgaggtggctatctggaagagcaagggatagcatggtactttactcatgagtccacactgcagttcccaagatattcacccaccattctctctatgccagaccctgtgggtgaggtcctgggaactcaagcagggaagctcagctcctgttcagaggagtcccagtcccactcttcaggacaggtgctgcagggaggacaagcacgggcctctgcgagattggagccaggcaggggtggtgcctgatggccaaaccgagttacacagatagcacatgtgggaaggtgtgcaaggatggaggtgggagactgggagggggcagtccatgggagagacagagaagggcttcacggagggtagtgggctggggaatcctgagagggttcaagtttaacttagaagtgaacccggcacatgcctttgatcccagcacttggaaggcagaggcaagcagaactccgatttccaggacagccagggctataccaaaagacccagttttcaaaaaccaaaaccaaaccaacaccaccaccaacagcaaaaaaccaaacaaggcgcaagcagagagcatggtctggccaggtgtgtgttcttataaaagtacgttaccatctcctagaggaagttcactggtgtcaaaccccttgctgttggcagtccctgtcatcattcacagccatcaccagttctgaccctctgcggtgcacgtccctagagggaagtaattggatttcatacttttcctgtagctgtggatcctcaggggggacatcattaccgagagtttaaaaaaggtatgaaacttgccctggtccctgaccccagtaaggctaaaccctgaggccacactgaaaggaagggacatcactcagccatcaccaaatgcctatagtcatcaggccccttgcagacagaccccctcccctgttgagccagccagacctctaagaccgtttgactgtggactgtgtgttcaaatgtgcaaagaaaaccctgtggctttttaaactgtggcaaggctgctttgtgctgcctccttgccctgctgagtgtcccggggaaggccatcaacaatttgagttttctgtcttcctattcggtcatgattggagcctcagaatgaggcagatgcggcaggataatgtcattaagcgttgccaccagagcgtggcataaacattctcggttcagtttggggagtggattcggaactctttggcatgcttcagggtgactgctgcttcttgggtttattcccatctggaagttagattctattgtgcgtccttgtgtgcctggccgggtgccacatgctgcagtagaaaccggagaagaaatgtggctagttagaggaaggaggtagggactaaggctggtagtgtcattgctgtgtccttagctctcgcctacgtattgcttggcattggcatacactggatatttcctaagtgtttgttgaatgaataaatgaagcggaggaggtgcagagcagtctgtgtggaagagaccagcacgttacagttaacggccagctgctgagagagtatgacacgggcagggctctgtgtcctccctgcctcacaaaagtcctggttctttccttgctccgttctctggacgagcccgcagagagcctccttgagctgggtgcctcctttcaacggcctacctgtgtgcttgccttgtgtgcagtccctgtggcccttcctgaagacaggaagcatttcctgggagacacagaagtgtaagagttgccgggtgtggtggcgcatgcctttaatcccagcactcaggaggcagaggggggcagatttctgagttcgagtccagcttggtctacaaagtgagttccaggacagccagggctatacagaaaaaccctgtctcggaaaacaaaaaacaaaaaaccaaaccaaacaaacaaacacaaaagaagtgtaagttgtttctgggtaggtggcctcagcaaagagctggtgacaaggtctagaaagatgaccctcctgactactctgggatgtactgaagttgggagtaggtctctagagactaaaggggaaccagggcaggtttcctgaaagaggtggaagaagtcaccacccagggaccctgcctttgaacacctcccacacagtgagctctgggcattttgcacagatattcacttcatagcagaatgctaccatagggacagaagacacacgtacctcacacggatgtcgttccctggattcctgattgggatgttactgataactgctccacccattgtgaaggcaggaaaggcaagcaaggaatcaacagcgccttagtgctgagtctcaggagttaaatcctcacccagggcccagcagaccaacgtaggtccctggcttgtgttctgtagtacggatgctggttttctttagtggctcagcactaacacacatacagaccctgcactggggaacagcaaaaggacagtctatttatatgcccatcttgtcatatgctgaacatcctgaacacccttcaggagccttgcctgccccttagaggaataaagacgcggtgggagactgccacgatgacccagcgagagacagtcaagagctggtcaggagctgccccagggaatccccaaaccacagcacctgcaaagttgtcatgctgtggaaatggatcaagtaggtagtgtgggggaggggagtcacatagagtgatgacagtgccctggtgggacctgtgctaaatggtatggaggaagatgtaagagtccaggattgcccacccagctactcgaggtctgctgtttaactagttaggtgactttgggtcacgttatgctgtgtctctgaagctatgtcctttgaatgaaggagcatgcggtctgcctcacagtgcctgtgggaaagctgccaggctgactggcatctctaacatcctgttttttttgttttttttttttttgttttttttttctgcattcatagtctttaccttcatggcttctttcagtggcttctcagggcttcattgtgggaactctgaccctgctgcacactgcctggtgcctcccagtttacacccttgggcagtctatagagactcacaggtgagtcctggacccgtgctgggtttagcgattgcttcctgtgttcaggtgctgtgcttcacacacaaaaatctgtgcatcttttccaacatggttgaggctctggggttggataaaatcaataggaagagcaggaggacaaaaccaagttgtcttctaaaactgtaccaggacatcaacttttgctacttcggaagcccagcttttatcccatcctccctccctgaactcttccctccacaataataacagcataacacacaggtcactctgatccttgtttgttagattttgtcagcctctaaagtcttccaatatcagtatattttcttcctcatagtattctgtaaaatatatattaggtactttttttttcagtgctctgacagagaatacttggcaagaagaaatttgaggaagagtgtatgtgaagttatagttcaagaggacacagcatgtcctagtgggaaagagtaggctgtaggaatgcaaaggggccggttactttcaggcaggaagtagagacaacagagagaattatcaagggaagagcaaggaaaacatcagagcttggatctccatatccagcacctgggactcttgttgaaatcatctgggctccaaagagcttaggtagcccagcccatcagaacttccaccttcaagacatatagcctctctcttgggctagatctattgtatacatatagttttcctcagtacatgtcccatacttttgacatctctagcatcctggtttctccattgcagcataaactcttttcccttcaaagcctcatagcagtggcttctctgggaactctgaccttgccacgcattgcctggtttcagtggctctctagaaccatggaggaagcctctatcatttttaatgcctataaaactagtaccttataaacaaaataatacttccaactcgagatatagcctgcttacattagtcacagcgatagtggtctctgtaatgttttgttgttagttctgaaatttctaggaagttgttttggatcagggaatcactttaaatgctttcttggttcaggttctctcctttcaattaaagttgaggtgtatggacctgtcctattgtcctagtatagagcaggagatttctccctggtggggagtcataaaaccattagagactctccttctgtatctgcaactttaaacttactcactgtcttagtttcttttctattgcagtgaccaaacactatgaccaaagccacttataagagaaagtattcaatttggagggggtggttatggttacagattagagtccatgctaattatgtcagggaacatagcaacaggctggcagtcttggcactggagtagtagatgaatgcttacacctcatccataagtagcagaaggtgggaggagactaggaatagcatgggcttttgaaacctcaaagccttcccccagtgacacacttccttctacaaggcagcacttcctagtccttcctaaacagttccaccaactgggggcaaagcatgccaatgggcctagggaagctgttctcattcaaaccagcacactcatttgctttcttgccaaattacatatttaaaaaagtatccttctgccccattgttgctaattttcactgtagacctgggtaagactggttggtagtgatggttccaccaccccgaagttaccttccctcaaaatttcctccgttaaacacattagtttgttacttttcaatttagcctcactcaagttctcaagacaggggctgggtgaaaccatattgtttgttagagtagcacacatgcggcctctagctcagatcttatagggttctgccctgcaaccttgtgagctgaggccttcactacccgcatttctctcaggatctggtcttccagaccctcaccagagttaagttctttgttagtttttttgtaatccagtgttgttggtatactatttgggctgctttattgggttctattgtcatcaacccatactccaccccacccccatccaatactagatagaaaagaaagcgtataaggaaagggttgtagacctttttagactgctcattaggggagtcagtttacttggggcaaattcaatctgcctgttgtcagagtatctccaaccagcaatccaacaatccagtaatcgcaaaggcagcagcaggagagcagccaccgccactggccctctcagggttctcacatttataccctctcaggagttcccggaattccaagcataaactatctggagctggtgaagaccacacccctcctagaatacaagacaatcagactcagcttccgtggacaatctgaagcagccccccatcccacacctgggattaaaaacatattcgcataacataactgggttttttaaggagccaaaatacttgctacacactgttccaaactcttccacatttctcctctggaaaaattccaaaagcctaaggaccacatggccagatttatcgatggcctcacttttcattactagcgttctgtattagttattctttgttgttgctgtggtgactaaagggagaaagagttcattttggctcagactcaataaggatacagtccatcactctggaaatggcatggtggaaggaacaggaagccagcaggtcacattgcatctgcagtcaggaaggagagtgaataggaagtggatctggctgtgaaacttcaagaacacccccaccccccacccccgccccctactcccagacccatttcctccaaaggattcttcctcctaaagattccacagccttaccaaacagtgatatcacctggggaacaagcattcacacacacacacacacacacacacacacacacacacacacaccatggaggacacagcaggtaagttgattgttatcttaatctgtctcctatttgcttttcctcaatattttactaccgaaacagtgctgagtgtgcacaggatgtaaaatgctgtgcacaactggggatgcaggtaaataaatggggaaagtggaattgctagatgaagtacatttgtcattttgaaagatggagttactttaccatccactgagttgaccagaatgcattcagttccattcagttccatggtgtacaagactggcagcttttctatacctcctgaaaaacaaaacatttgactttggatctttactaatctgaaagacaaaaagaaggaaagaaagaaagaaagaaagaaagaaagaaagaaagaaagaaagaaagaaagaaagaagagagagagagaggaaggaaggaaggaaggaaggaaggaaggaaggaaggaaggaaggaaggaaaatacatttcactgcagaaacaagttgtttcttcttcacactgtctttcacagagagcatttctttctatttgcttatttatttttggttagaactcaaaatagtatgtttcataaacatctccatacatatgtatcattgtatgtttctcctagtcccctccctcctaccctctcccattctttctacccacctctcactggtcctctttggtctctaaaacctacttcgggtttcaaatcactttgattttccccatattaaaacaacaatgtctaacttcttcatgagtgagtgttttttgcaagaccaatttgttaactgccccatccttttttttttactgaaacaggatctctctctatatagccctgccttccctcagatctctgatcctgttacctcagactactgagttctcagtcaacaaacccttcacccccattcctagctgtcattgtcagttctggttcccccccccccccccgccccccaactctttctttcttgagatggatctctctacatagccctggctgtcatggaactcttcgtgtaggccaggctggccttgatcacagagattcacctgcctctgccttctcaatgctgggatttaaggcgtgcgccaccacacccagcttcccacctttggttcttgttttctatagtatgtcttctatttcttgaatttaaagttaggttgaatggttaatgttttatttttcattttaaaagttggtcattgaagacattcatctaaagtataccttgtaaaacatgaagatgttaattagtgttaggtaaaaggacctgaataaaggtctgggaaggttttaaaaagaaatcttgcagactatatttcaatattttacagacaataccaaaaaaaatgcatctaaatcttttagattaggaattcttttttttttctttttttgggggtgttttttcgagacagggtttctctgtgtagccctggatgtcctggaactcactctgtagaccaggctggcctcaaactcagaaatccgcctgcctctgcctcccaagtgctgggattaaaggtgtgcgccacctgtgcacggtgacatttggttagtatacactttttggtattttctcaaactgagaaactgatttaagatttaattgcaagttttacattttgaatacttttagacttagagaaaaactcagcacttacatcgtctccatgaggccctgggttcaatctccagtatgggaggaaaagagagagaaagtgggagggtgggggagaggaccaaaccaacatagagagagatctcatttattgacccccccatacatacccttcctctacagttacctcttacactaatattacatatttagtaaaattaaccatccaatattgctacattattgttcaaatgtttttgcctacagttctttttttgttccagtatcttggctagggaacccatgctctattcggtccttatgtctccttgggctcctttgaactgtcacagtctcttgaccttttcttgttgttagtgaccttgacatctggaaggagtgctggctgggtgtttctggtcccccaacctcccaactggaatttgctctgttatccttacgattagagtgtgtgcttcttccagtgtctgggaaagaaggaggccacggtgataggcttgcatagcaggtagctatagctactagaaagcatagtatgattgattaagttgtgttagtgatatgtgttattggcttacttttagtttcgtgacagctagtcaccctcttcacaaaaaagaaccagggcttggattttctcttatataggctggctttctacctaattatgcttagtttatgtattttcatttgaagaacgtcaccagtatgggggtctagtaagataggtcacccaggacggagaggtacatgccacaatgcctgacgacctgagttcaatcccaggccgccggtggtagaaggagagaattgatccccctaagttgccctctgatctctacccgctcaccttggtgcatgcccctcacccccgaataaatcagcaaatgtttaaaacattgtccgtgtgagcatattacctgtggtttcctcttagcccacggatttttttttttttttttttttttttttttttggtttttaaagacagggtttctctgtgtagccctggctgtcctggaactcactctgtagaccaggctggcctggaactcagaaatccgcctgcctctgcctcccgagtgctgggattaaaggcgtgcgccaccacgcccggcagcccacagatttaatagatggacttttgttactttctagatagcaggcatctctgcctacgaacatttaaaatctgagaaaatgtaaaaactgctcagggatcagatgttgtgatgtctgtttgagtgatttgcccctcctcctcattcccagatcctgtgttatggtcactctgagcctttatttgtagcctaggatgcaggagaggttcttggtggctcccaaaagaccaggaagagcaacagcattttcaccgttgcggcacagaccccagtgcacacatcggttagatctggcatcttaattatgtacgctgtgtcttttcattggctgtgttctacttggtcagctgatcccttgtgagctggaggctgagaatcacagtcacctgtcctgcagcccccccccaccccacccccaagttttttccgctctcaattatgggctccatctgatgcgtttgatcttcagctgtggatcgtgttttttattacagcaaagtagactcctttacttcatgtaagacttctgccttgaactccactttactcttctcatgctaaggttgttaggtgtgaatttacacacggctttggctgtgtgtctgtccctcattgttcccagctctggctcattttgctatggtatggttctcatgtgttgtatgtggttggggatttttgacttgttcctcgtttttttttttttttttttttttcagtctttgcttatgagcaagcacattgttatggctactactttggtcttggttttactatccggtcttaggtcttgatgtcttcttgcttcttaaaacaaagccctcagggacggggtctgttttactttgggctgccttccttctgacagtttagaaggtttgtattttattgttggttgtggaagttatctttagaataactatgtagaatgaatttaatcttttgtttagactgtctgccttctaaaatgagtaactgcaaagattgtttaccgattccatcacgggttctagctgctttatagcagctgttttaaatggcagcttttcttgatttaccttttttttctctctctctcttttttacctcctttgtctctctgatagcatcttaaaatttttaaatgacatttacttattttgtgtttgtggggtggggggaggggtgtgagtatgctgtggtgtgtgtgtgtgtgtgtgtgtgtgtgtgtgtgtgtaggtcagagaacaacttggaaattggttccctccttccatctcctgcgtcctgagctcaaactcaggtctgcagacttggcgcaaagcacctgactacctgagccacccgggctggcagctccttatctagacctaggaatggctccttgcggatcacagtacgcagccttggatcaggattttgcagacagtatgtgcaaggagtgctggaaattacacaaggggcacaggattgctctgtggctcacaagaaacgaggttctgggactcgggcagtaatttcttttagcagtcgcttcttttcagtcaacagaaactgtagctgtagtttgtctctgtctctttgtctctctgtctctctgtctctgtctctctctctgtctctctctctctgtctctgtctctctgtctctgtttctctctctctctttgtctctctctctctttgtctctctctctctttgtctctctctctctgtctctctctgtctctgtctctgtctctctctctgctccatgccctcctccttcctggcctcctggacactgctgactgtgaagaaggctagttttgctttcctgttgccctgctttcccattccctgagaagccaaaggcagacaccagactgcatatcgtctgcccagtgctgttgattagaccgttggattcttccttcaagaatcccagctgctggcccgctctgcaggctttccccaagccctgacctgctaggtgccttctcgaggtgtttttggactggctttgatctttgctgctctgggctgcctcaggctgtgtttggcagatttcccttgtaagctgtggtttgggttacaaatgtgtccagttttgctgaagagggcgttcgcatttctagttctttttctccttgattttgggtgattttcaaataagaactcgaagtaacttttattctgccaccttttaagctgtctagtgtgggggtttttgtgatctaatattctctcagatcaaacatcacccagaactttccggctgaagcagagtcttgactatagaaagcggagaaccagagctgaagaccggagggcacaaaagaatgtatccacgctgcgcggcagcgggggtccttccttgccttctggactttggttggggtgtgctactgtcagggtggtgcattgtcagactttcctgtctgataaaacacctgagaaaacaacctaagagagaagggtttgttttggctcacagtcccagagtttcagttcattgtggcagagaagtgccagagatcggatctcatctccggaggccagaggcaccatgggaacgcccacggtagcaccggatgtgcacctgaccatcctccggggcatttctgagtccaattaggttgacgctcaagattatcatggggctggggagatggttcaggtggcaacgtgtttgctgggcctgagtttgattccctgaaggtatgtggaaaagccaggcacggtggtttgccctggggaagtgagaacagaagatggatgcctggggtttgctgatcagctgggttagcctgatcagtgcgttccaggtcagtgagagacccttaacaaaaaacaaacaaacaaacaaacaaacaaacaaacaaatcagacagacagcatctgaggaacatagtcagggttgacctctggcttacttacctacacacagacctgaaaaagaaattatcaaaagttcacctcatatcaattaatagggcaagctacatttcatctctggtgcccaaaaggctcagttctttcttataatgtcttaaaatgtgttcagtccatcttgtgtatccccaaagtctcaacagcggcagaaccattcaaatccaaattatcctctgaacctccattcccacattcagccatgagcctcggcaaaatcaaaaacaagtcacatgcctcgaagataagacaacacagactaaacatcccccacttcaacagatggcgggggggggggggtagaaaaaactgaaccaaatgaagactggaacctcttaggggaaaacacagggcacaaggtgtcagctctgaacagcccttatgaccttgttgtttgcagatcacctcacctctgggatgcctgtttgtgctcacactcctgtcttcttcagcagacatcctaccttcccgccatctttgatttcaccttcacagtttcatgcatcacccaatgggaggagtcccttggcttctcctaggaatcccttgcctgcagggaaaccacatctgtccaggctgtctagccacctaggccttcctttgtaatctaggtttaagcctccacggtccaagagtcccttggcttctaggaatcccttgcctgcagggaaaccacatctgtccaggctgtctagccacctaggccttcctttgtaatctaggtttaagcctccacggtccaatagttcttgcattctgcatgccagtaaaaccagcataatgctagtatttgctacctccttaagcaacagctagagcatcttggaccatggatgaaatggtctctgagtgccttgatggttgaaagcagggaatatttcctaggtacctgatgcaggcaagggtatcctggagttatcctcttaggacggtctttcaaataagtgaaaacctccacactcttgagccagttcccaaaatgcttttgagacatctctcccgttctgctgatgtccttctacgatggctctaatccagtggctctcaccttgtgggttgcgacccctgtggtggtcgaatgaccttttcacagaggttgagtctctgatatcctgcatatcagatatttgcactatgattcataatagtagcaaaattatagctataaagtagcaatgagaataattttatgattgggcatcaccacaatataaggaactgtatgaaaggtctcagtgtcaggaaggttgagaaacattgctctagtctctttggaggccatccttccatggtgttgtatttgttacttttcttgttgctgtggcaaccctgacaaaagcaacctaaggaaggtgaggctttgctttagctacatcctgctcatctcttcggagacagcccaaggcaggactgtggggcagggtggccaaggtgagagagagatgagtgaggggtgagagatgagtgaggggtgagagatgagtgagaggtgagagatgagtgaggggtgagagatgagtgagtgaggggtgagagatgagtgagaggtgagagatgagtgaggggtgagagatgagtgagtgaggggtgagagatgagtgaggggtgagagatgagtgagtgaggggtgagagatgagtgaggggtgagagatgagtgagtgaggggtgagagatgagtgaggggtgagagatgagtgagtgaggggtgagagatgagtgagaggtgagagatgagtgaggggtgagagatgagtgagtgaggggtgagtaccgccccagctcaccttcgcctttgtagacagtgcaggaccccagctcatggctgaccacattctagagtgagtcttactaccccaggccagcccagaaactgccccctccagcataaacagaggttggtctcctaggcaattctagatcttgccaagttgacaatcagtattaactatagaagcttctttttttaattaatatatatataatttacatctcaaaagttgcccaccctcatggttcccccacagagtccctcccccatgctccctccccttggactttgagagattggtgcccctaggtgtcctccaaccctgacacattaggtctctactactgaggcaaggcaaggcaaggcaatcctctgttacttatgtgctgggggtcttggttcaacccatgtttgccctttggttggtggctcagtctctgggagctcccaggggtccaggttagttgacactgttggtcttcctgtggggttctagccccctcagggccctcaatctttctccccaactcttccataagggtcccccaattccatccaatgtttggctgtaagtatctacatctgtttcagtcagctgctggacagagcctctcagagagcagttatgctaggcttctgtctgtaagtattaacagagcatcattaacagtgtcagggattggtgcttgcccatgggatgggctggtcattggttggccatttcttcagtctctgctccatctttgtcactgcatttcttttagcacaaattttcggtcaaaagttttgtaggttggttaatatccttatccttccactgaggagtcctgcctggctacaggaggtggcctctggaagtttcttttttggacaaactagaagtgtttgaatcaccccattgtgtattttgcccccagaactcactgtaaatatggctgaaagatctaagctgcagcctcaacactgggctgccctgagaagccctccctcacattaattctttcttcagctttaaattcagtctctgtgaagtctcaggacatggacaaaaaatgtgtacagcttcttttccagagatgaacacaaatgaccttggttgagttcccatgagacattgcttctgcctggactgttcggtggccttcctatgagtgtcctagtctcctatggtctcctcagaatcacccattaagctgtgcttacagcattctagaatttctctagctggcttctccaagcctttctgagttcttcctacaaaccagtgccacgggcttctgtaccgtgtgctcaggtagagtcacggcacaagctgcatcccagtatcagttgctgtgtttgtgccttttgtgctgtgacaaaatgcctggcaaaatgacctgaagaaaaagatttattttccttgcagagatttctgatcatcatgtctaagagagcatgacctagcatggcagctcacatcttggtgatggtggccaggaaggtctgggggaatataacatgcctacatatcttagttagggttttactgctgtgaacagacacagtgaccatcaactcttataaggacatttaattggggctgacttacaggttcagaggttcagtccattatcatcaaggcgggaacatggcagcatccaggcagtcatggtgcaggaggagctgagagtgctatatcttcatccgaaggctgctggcagaatactggcttccaggcagctaagatgaggatcttaaagcccaagcccacagtgacaaacctactccaacagggccacactttctaaaagtgccactccctgagccgagcatatacaaaccattacactacagtagggagctttctccctatctgtcctggcagatatacctagaggtaagtcgtattggtctcataggtgcttcttaagttgataagattagccatcaccaacaggaagttatggattggcaggacagagcatgacagttgtcttggggaagttgttcggagctgagctactctcagactagggaggaggaaggcacacacttgggaggaagaaggctcatgcttgttctctgccaagcagtgggagtcgaggcaaaccccaacctttctttctccccatactgagggccatctgagcaccctaagctccctggagtctgcctgaccttccggtagccttcctcaacctcctgggaaactgccatcgtgcattaagggatgcccactggaataaatgttataaatgatgtttttatacttaggggaaacactgatgtaaccaagggaaataattccctgtgggatgtccagagaacaaaggcaagaggatgcctgtctccagcgtcctagatctgagttttaatcataccctctttcagattctcataccacctggagggagctgttttatcccatcttacagaggaggaaagtggagtccaagcgaggtttaaagtaatgaggggtttggaacagtgctgtctggcttcacagtttggaatggcccattcttgttccctctttctctgccattcattttcctgtggcagcaacatgggaaaggatgaaaggatgctggcatctttgtccctgggtgaccctgctaaatacttgctctatgtcttgtttcccaagcctggttacattttaagactttttttttttttttaagttcaagacaactggagctccaaacccatgagccacaccctaaattgtatggcatcatgccttagccctgccattgcttgggggtcagttcctttggaacagtgatttccagtggttgctctggtgccaagaacagactgagagcagaggaccttggtttgactgtagctcatcacttattacctgtaagactagctaatcactggcctccgtaagatgtagatgaacagggaaaccttaatcattgaagacagtgtctgccatatctcatatacttggaaactgtgagatccagagtatcgttaattattatgcacattaattattatacttgcaaaagggccctaccaaggcctgggcataaatgaagggatgagtagtatcataacccatgccctttgcttccttctaggagcttgggtccctgccacagcccagcagaggctgtggaggtcatccatcaagaagcctggttcccagcctcagggtccatccttggataccaggattggaggcatctgcgaggtagcagtggccagcagtggtcccttccccatagtgaaccatgggtcagaagctctctgggagcctcaagtctgtggaggtgcgagagccagcgcttcggccagctaagcgggagctccgcggcttagaacctgggcgaccggcacgtctagaccagctgctggacatgcctgcggcagggttggcagtacagctgagacacgcgtggaaccccgaggaccgctccctcaatgtctttgtcaaggatgacgaccgcctcaccttccaccggcacccagtagcccagagcacagatggcatccgtggcaaggtgggccatgcccggggtctgcacgcatggcagatccattggcccgctaggcagcggggcacccacgctgtggtgggcgtggccacggcccgagcccctttgcactctgtgggttacaccgcactggtgggcagtgactccgagtcgtggggctgggacctgggtcgcagccgcctctaccacgacggcaagaaccggcctggggtggcatacccagccttcctggggccagatgaagcctttgctctgccagattccttattggtcgtactggacatggacgagggcacgctcagcttcatcgtggatggccagtacctgggcgtggccttccgtggcctcaagggcaagaaactatacccggtggtgagtgctgtgtggggtcactgcgaagtcaccatgcgctacatcaacggccttgaccgtaagtgtcctagtctaggtggccaggggtgccaagacgtcctgcccggggagagctggggagagggggagcggagcaagtaaaacaagtaacagttggggaatcctaaagtttgcagcaggggtcagggcgtggttttgaattctgacttctttgaaggtttgacgtttggggactgtgcctcagttatcatatctacaagtggcatgatggtcataacctaactcagggcacttaggggggtcatgtaggataatatgtgtgcttagaacagtaagggcactttgataacggctctgagtgctgaagtgatttatgaaccgacccaacctggtcacagctagagagtgtcccccttgcccagaccctaggtgggagaccagctatcaaaaaagatgtagtattagcagttgtcatttattgccacctactgcatgcaggtctgaacacccaaattccagctccttccggaagctgtcaaaggaggtaaaccacttcttacctctagctgactggaaccgcgggaaaatgaagccctggctatgggattttgccgccccacccccacccccaggaaaccagaaatctagattgtgtgaactgtcccagcagttgctaaagactgtgtggttaagtcaaactcctcagtgggctgttgggtttcctcagcaacaatgaagtccttctttattcaaaatgcataagctctgaggcaatttaaaagtcacagtaacaaacggttgccagaggaggcccggtagcctccaggaaaggcacgcatggccccatggctgaacttgaatcccaaccctatgtcctgtttgctcgctcgcacattccagctattggggtttgcacaggaaatgtcctccacaggctcatatgtttgaacacgtggtccatagttgatggtggttatgggaagttacagaatctttaggaagcggggccttggagagggaagtggattcactggctggctggatcctgagttttgatagcctggcttcacttcaggtcagctatttctctgctttctgattgtagatatcatgtgaccacccgcttcccacttctgctgctaattttacattccttgtcatggggacaatatcccttctctcccttctctaaacctaagccaaggtgagcccaccgttaacgttccttttgaccaaccaggtgtttggtcacagcagtgcgaaaagtcactagtgtccccatccaccagcccccatctgaagactccctcccaaacacaccttcccaaacctacagagagtttgcagccccaattccggggttcactttaaatgagagatatacttgccagccagtgtggctgattacagatcccatttgtcttttgagagagagaaaacagaaacaataaacaaaaacctgaagcgtagcgatcaagaaccataagcagccccacccccaccctcgcccatgtctgcctctgagaccaagcattttcttatgtttccctcttcagttgagagcccaagagtaactaacactccagaaaaaaaaaaaaaagaaaccgcagtcaacgtttgacttgtgtaaaaatttgtgtttgcctgagcaaaatgtgggctgatggtttttttcaagggtgccaagcaaacacaaaaatggctagagctcccgacaagggtatacttggtggcatttttcctggtatttgtttctgtggttgtttgactcagatgaatggtggaatggtgctccattttctgtttaactgtaaaaccctggcgcagatgagtctgccctgagcagggtgattctatcatcacggtgccttgtgggagatgtctggaatcctcttagatagacatggtgaggcaaacaagggcataagtaagcactcccgtccagccgggaaatctactgctggaattaatttgggcttgcaccaagctcgggagggtgtgtcccccacctctgtacatcgccaggacagcaggtctgtgtctccagagagtcattctaattccctaagatccacactgcatctataaagtgggacatcagctccctttcttagtttgaatgttaacatccacgtggtagccaggactaaatgtctgacattgaccaccagggaagatgcagatgtgaaagtctaaagaaagaacacttcctttgggttattgatctgctccaatctaactgcttggtcttcaacaacaaggctctatcatgctgtccctgtggctgttagagtcagggatttcctgcactgctgaaggaggctgggtgggaaaggtagttgcgtgctgggtccttggggtggtttcatcttcctcctcattggaatggctggggttggcagaatctgaagcaggattcaggaagtggaggagagtgggaggagtgactgcgatggtggagtaggacgtcatgatgtcatctgtggcatctcctttttgatgacagggtcagtttgtctgatccagtgcttggaaccagctctgactatggtaggacacagccatacaggacataaaagtaggacaaagcggtaggacatagctccatctggtagcgcctcggggctgggtgatgataggaaaagagctatgtggtatgtagaaggtgacctgagacaaattccactgtggatccccgggagggaaatagtttggccctagagagtccctaggtaggataggtggcccaaggttgaaagaattcagagattttgttgattgtagacatggtaacctgactggggttgggggttggactgaaagcatcattgggaataaagaaacctgcctcttaaggtcacctccctgaaagtcctcctttctcaaagcctcagtgtcccctcttgtgcttggggtaatcaggcacaccagcattgagcagacacccaggagttaaagcccattgctgtaattaagcagttgagctgagggagggccggggggggggggggtcatggatagaacaaagagtggcctttgtaaagcattttcctctcttgcaatggaagttgttaataggtaactgtttttcaatgtatgattctttatgactataaaagcaagccttaaaaagtcactggaccctgaagcacatatttgatatgtgtcctgataggaagagcgtcctgaccgtgcaatttcctcttgcaaatgcttgatgccctggtacccctgatgaatagaatcgtacatggtgtagaatagctacaccatggaatatacagcctagcgtgtgggagtttcctgcaaagacctacaggatgcctaagggttgtagctgatgagataaatacagccaaagccaggcacatgccctggctgtctgtctcagttgtctagagccagcctaataacagcaataataatactagctattatatatatttaaacatttacttaatttaaatatatatttgtatttaaatatagttatatttataacaataataatactagctagaaacacctcatccttctgggctcttttctaagccctttataaaattaatcactaaaattctctttaagcagagagcttaagcaggttgctcaaaatcacacagctcacagctgaggaacctggaggcatgctgaagcaaattgtgtgcgatgcttgtggggactctagcagacaggcagggggagagtcagtcggctccacctgactgggtgccctctggtgaacttagatgagatcctgccatcctgtccggtgctctctctctctctctttgaattgcttccttcccaccttcccagccctcaaagaactctggagagtatgctgaacagctaggctagatgcaggggatgcctctgctgcccctggagtcaggtgccccacccctgagcaggcagtgtcatggaaggtgccccagctattctgatgttcacctttcgggtagactggccttgtgatgtgctctggctactgtctggaattgcgccctagtctgaaggctcctctttccacgtgccagaacagaagtacgttttactcgggtgtttgattggtgctggttcaggggtgttctgtccagagggccccctggtgctcaggactgacttgtggctggagtgtaggagttcaggtgtggcatcatccagggacgaagctggccgagaggcgtcctccacccgtgccaagcagaaggagctatgtttccagacgccattcctagatggtttaatcgatctgccaacaagtatttattggtgcaacagtgcggcagaggaggctggcagctggccagagcttctggtattgatggggaccagagaggttttccacagaatgagtgactacaaggacatcctccccttgtcagattgtgctccagctccgtgccgagcctaccgcctccctgttcaacactcacgagtcttgcgtgggcactgaggtcctcccaacttccctaatgaccgaatgtggctccaacaaggtctgtgtcggacctccccatcctctatcagctggtcaccccagctcattactaaccagagagacactcaagtgatggagaagtattcaggcagggatgatgacaggaagacctttgcgacaagtggaaaacgtcaggagttgatgcatgcatggatccttttagtaggtaaagatgtaggttggttaaccgctgttaacaatacacacagtcgtgtattaaagcactgccaccatctcctccagtccccagccccctctcatccctgccaccagccatcatcagcagtttctggcgtatccttccagaaatatttatgacagggaatttttagaccacactgtaagcagggctctgtttcatggctccctcccccaccttaatggatcttggcaattgtttaagtatcagttacggtagagcgggctcatttcttattaacagttgcatgtattttcatagtatggttgtctcataatttaattattcagatccctatttttgtacagccaggccgtttcctgtaagaataaaccttttaatcttcattcaaatttcatttatttcctcccttcccactgtttaaggttctcaaagcctcagttttgccatctatgcagtgggatggttagaagaccatgcaaagggctgtaaaaatgatgcaaatgtgaagcctggcccggcacatgggtggcccactgcagatgtccccatgggagctgccaccacactttcgcatttcctatcgtcccactgagctcttctcaggcacctagtgagcactgtgggtgacttggtttcgagctgacaggacagtagggttatatggctgtgattctgagaaggctgtggacatcttattgcactgagctagccacagctgtccagtccagccagtccggatgtaggatggacattgacaccatgagaacctggcatccttgcctgcaccaaataggccatggtttgtgtgttttgtggtaacgctgcagccgaaccagctgattctgaaatggagactaatctaatctagccttcctgtctacccctccttatagcaccccatggaaaagcacacagtaggtgctccgtagtggtaactgcattttagtcttctcatagttgcctctctcatagcacccatgcccaggctacttaggaagtgcacataaatgcacatgaaggctttggcctctcatggcctgaatagttttcctttttttcattcacagcaggcaactgtgaaagtcacagttggccagagtcgaaggagctgcctgtgatcactgcccgccctctcgcagtgtgacccgtgcgtgacccgtcccagcttctcattgtgtgctttgcctagcacatctgtccccacattcaggccagctggaggcggtgtgataggccaggcagttccattcaggaccctgccattcagaaactggacccctaccttttattctgcataaaaggaacagattttcggctgagaaagagccttactcagctgccactgtcctgctttgagggaatttccatgtttaatcgtcatgagccatcccacacagccctgcctgtcaccgagggctttgacatgtagatgccagcatctgaaatcaggtgtgggagggactactgctactctaaatgtcagtgtgggctagtatggtctggaggtaggtctggcctcaggatctgctggcaccctggggtccaggtctctctacctagctgtcacctgaggaagtcattttaactctgagctcagtttgttcatctgagaaagagaaatttattttgccgtgaggtgttggagccagcaagcgatgtatcaaaagtgacccatctatttccgggcacacagtagggactcacaaaatagtagacataaaactactcatttggccttttagtgttccatggcctgaaggatcactgtggacacttgctgttagtaaagtttggcccacactgaaatcagagggatttcacagtagggactatgctagcgtttggaggttttaggatatgtggtggaaactgtaccagcagttcagaggcgccattgtgtgcgatttcatcccagatgagttggatgtgttcgaccttctccaggaaggtctccctctgagtgtcttgctcgagtctttctctgtcaggttatagctcccagtggtgtcttgtctggtgaacatgtaccaaggacatgcagacaagtggcaccaccactcctgctgtggcccatgtgtgtacctatcgggaggaggtgataggtggactgcccagctactgttggacattggtaggggaaaagggaggaggcatagtgtgtccaagcagtaggatgcgaagacgtgggatcctgtagccaattggtagctacattggacaggctgttatggaatgatccagggaataggaggacatgccaaggtgacttaccagttagcagcagaaccacagtcaaagcccaggctccaaagccagagagagagagagagagagagagagagagagagactcaccattgtggttcgtggctctgtactggaaagctggtgtcccatgcgcggtatggatatgagaggttggattgccaaggtcagcaaggactagaaggaccaggaaggcttttgggggaaggcctttagcacagggattcgacccgcatctctcctttcatgctcttctgaccacgaatacacacagggagagatccaagctggattcccggtgacccttccagtcagagatgctgcccagagcctctgtagacgctggaatcagatacttggacactggaaccgatgtctaagcagtaggggaaagaaccttgctgtgtcctgtgtgggccacatgggtatagcttttctgattgatgtgtttctcagaatcctcaccagggtgtgaccgtagggtggcatttgtcccggggatccttccacggtgcggattatgtgtgacctcataggtctgtggaagcccaagattctgtgtttctaacaaactctgggctgatgccaatggttgaaggtgtggaaaagaaagagcaggggtcctcaccatcacatcctggcccggaaaccctcacctcccacctgtcccttccttcccaggtgaccccgcagctaggctggtctacagaaatgcatgcttgcccatgacagcaaagcctgttgctgcccagtctgcatctacccattgtctcacctgccagctgacaccaggacaggtccttgaccttgcaccttgtccctggaggccctcggcatctcctcctctccaatccatctcactaccatcttgtgttcccttccccatccaccacatggaaaaattcgcgtgattatggcagagttttgttgttagatgactgggaaagggttacaaatgaagctgcttgactccctgacacatccatggctgctcaaggccttctgtcaggaaggaacgtattttgcgcatgggatgttggggacttaggaggatgaaaagccagctcatggcggctgtctagtacttacctggtaattcacaaactagatcactgagggtcacgtccagttttgtgtggcgacagcaagcccgttgctatactatactttaggatgctgctgaagttggcattagtaacctgcactgtcaccactcctgtgtactctccatcccaggccagcccactgcacccgttcttatcccacgcccctggtgaccaatctgagtaggaggtgcccagaaagcaatgaatgagcatgcttacaggagctgtttcagtaagtggggagagctgtggcctgcaaggctggctggcggcagcatttatctgccttccatcagggagccagctgattcgtcctgtcttgtcctttggttaaggcaagggagtggttagcgtgagttacagtctggcccagacactaataaggctgctgtctgaggccttccataattcaagggaaggctgtgctgtgtaatggccttcttcgtcagatcttccgggacttggggcctccttaatgatttatttgcctaggatgaaattaagccgaggtagtgtgagcttggaaaatactgcctctctggctttcccagtccatcctgttcagagaggccatcttctataaatagaactgtgagacctgcttcgtgacctgcctgccgggagccctgataggcaagggctgccctaccatgggcccctgagagcacacctggccagcacgtggtctctgtcttccactaacatagcctagagctccactgggttacagtgggggacagaggtactagcaaaagacttagctttgtcccaatttcaaagtccttttaggacatgctttttaaaaaaaaaaaaaaaagattatttgtatgtgcatgtgttgcctgcacatatgcgtatgcatcatttgcatgtctactgcctacagagttcagaagagtgcatctgaccccctggaactggagttaaagagggttgtaagctgccatgtggatgctgggacctctgcaaaagtaacaaatgcccctaacttccgagtcatctctccagcacccacatgtggacccagactgagtttcagtgcttgccctctgttggtgccccaccctcattatttcagcggggtgccccagggcagaaacacatttgcccatggtgcttagtgaggtggatagcagtcctctgcctgaggctggggccttgctagcagtgctgtgtgggtggctgtctcaagaagtgaaaggctagaattgaaacttaggccaccggctacgagtcagatgggatgtttatgttaaggcttctttggaaatctagaacccagaagagcccggtttccttaggagggatatgagcgtaagatcacattagaattgcaggtggtggtggtgggcacaggatcggaaggggctctgacatcctatgtgtgccttggctacacactggccccagactatccccccaaaccccctgcccagcttgccagtctcttttcttatcattttgggcgctacttggctgctctttgccctgccccttcctttgtgtactgaatatgtcctaggtgacactctgtttctcaggtcttgatcttaagttcttggtcctggctctgtagccctctgattgtctccctctgggagggtctcttggctggcctgtcacctgtggaagtacgtggacatcctcagtgtgctctcttggtacccacctctcttggagcagctgaaattctgtaccacgtatcacctgctaaacggagaatccccggtggtggccctgaaacatgtgtttcaagctttccagtcagtttgtgtcaggaacccggcactggcttgaagcacgccatctgggatgccctgctgggagagtgtggacagagcagagccaggagtggtatcctgagtttctagaaactggctggggaacattgtccaaggcgaaagtgaagatctaccttccaaagctttctccttgtctctgagaccaaagatgcttagcagaaattcaactgctttcctttctacaagggagaaaatgtctatagtgcctaagtgatgggtaccactgtttggaaaggtgtccatactctatgagtatctcctcaggatagcctcaagacctctaggttgatgggcagtgtgtggacaccctgcccaaagccaggtccccagaaccagtcccattcttgtatgttcttttgtaccctctaggtcagtgggggatattctcaggctctcaggtctctccatctccttgtcatccattgccctgtgtcccagcttctgggccttggtggggtcttagtaagagctaattgcatgaatggctacctaactgagagttaggacagtggtgtgaatagcaaccatgaccacgtggtcctgggaaactgctccctttctccagcacctgcgggaagcaggaagcaggaagcaggaagcaggaacgcacacactcctcactgatgcttctggggaggaagcggagaggttggcagttagtgaagaattctaaatgtacagtaattgtgccccctgccccctggctgcttacttgctgtgtgtgcaaagacatgatctgggcagtcattgcaacccagtagtcagtgctggtgtttgtcctgacacaagccagagccaggctgctgtagtgagagctctggagacctggtttccactgctgtccagcctgccctcgggattaggacgggttttgttcctgtcatttttatcagcgaactactacataactcttttctccactatctgttgtatgttcatcactgggaccactcgatgacagtttgagcaagaaacggaacagcgcttaaataaatgcctgtttatgatcaatgtggatattgatatatgtggaaaatagatcaagaaggggcgattggcaactgttctctgggaactcctttgggagagggaccgagaggaacctagacgatgacacccgtgggccaatgaaggttgtagggagagtagcttggtagggatgagcctcttgccaacagcactgggcaccctgggaagagggtaccatgagactcagggtcagcattgcctgtccggctcctaccagtccactgttggaagaaaaggtattccaaactttatttgaaagcagggccacccttctctcttctgccggcacttgcctcctgattctacagaatggcttgtggtaaagctgttgaagaggcaccttggtcaaagtccttattattttctcttctacccacaagttggatgagaaatcagtggctgagagacctgtcagggttatagtgagccacagagtggagctggaactctgctgattggtctttcatctcgcttctgctccgagccagattcagggttcactttggtttgaacagagttcattaggtttgctcggaaccatctaggaggtccggcccacagacgcctctgtgcagtgaggatccccaggatgagcctcggccagctgatccctggctaggtgtttgcatttcagttcctcccgtctggagcagcgggcaggtgatgcagggcatatgccaactaggtctacagtgcttctaatcctttctatccttggagagttctgggggaggcggtgccagttcaaggctccatcaggtatgttctacctataccttgtgtctcccaagatgagagagccccacggacagtctgagtctctttcacctcagactccccagagtggtatggtggattgagagcctctatttcctgtttggctgacacaggcaaccctccttgactgctgaatactgagccaaaatggattgttcagatgtgtgaaaggaagttaaaatgcactcttgagttgaagtaacttgacatcccctgagtctgtgctagatgtgaagaggagaagtgagagaggccctggggaaccatccgggattgggatccaagagactggacagctggtttcagatagggcaaatggtctctgtgtgtgtgttggtttccccacccgggaaagaagtttggataagaaaatctcaagggtctctaccattctgttatctctgctgttgattgtctgcaccgtctgacttgtttaataaatagttttcacgcccatgctgtgacaaggtggctacaggtgacttctacagtgaaataaagcaggtcttctgttcctggcctggcctgcccacattcagatgccctctagcatgcatagatagtagctaccattttagagagtggagaacagggctattctcaccactcaggaattgagactttcaagactctggggacaactatgggggctcatggacagagcaaggatatggttttccttgggactactaggcagtgtggacttcaggtgtactcgtgagttctttcaggccttgggagccagtcagggagggtgggagggacaggaaaccttagagagcatactatttggggaggaggaatgccaggaattccaaggtggccagggcagtgaggccccagctgcaatgtctgccactacccagaagccaggccttttgtcagcacctcactctgtaatttgctcaaatccataagcccactgagcctcttggtaggtgagatgtgaagaagaggcacgatgggtgctggggatgaagtaaaataagactcaagagtcctgcgtacatgggtaggccacccacacagcatcatacttcattctgtgatcatacattcatgcgtatgagtgcgggcacacgcgcacatgcagatacacactcctctgtgactttagggtgtctatcctgacttctcaatagggccaaagagtatttggagaaggagacagtacattcctcctttgtcccccacagccctgaacacccaacagcctctcacagtccatgcagtccctctatgacagatggcactgctggctgccactcagggaggtgaatatcgcctttcttctttccctctgaccctgtggcctttcagcctcagattcatgcttgagacttgctgaacacttgccttgtctgcgacacatctgagcatctggctgggtctggatgtcattctctgaacccctggctcacctcagctctgatcctccccccaacccttccatgtataaacaaatccaggtcagagggcagaggccagagctgggccttgacagcgtttccccctgggatgtcttggtgaaaagcagtctggaatcaggtttcactgttgccctcccaaggctgagacaggccttgctgaaggcagcctttcttcttgatttgttgaagtgctgggctacacctcaaccctggtctgagtttattgctcaggtctaaagctggttttcttgaagtccctgccatagacaggcaaaacagagagggtttaactcttgccagggaaacttatggcataggtaaattagagtcaccagtcagtcacacaggctgtgagatgttagttcctatttgatcagaactgacatttgggttctggcctatctgaccctacctttgggccatgagtcttcctcacccagtgtcttccacagtatccgtcccggctttggcctcagaacggtaattggggcttttccagatttggcttttaagctgggtttagcaacctgtgtgtacggagctgggcttgggactctggacctttctggacaatgaattgtttggattattttgcatctccagagtgcttgaaaggcacatgatctcccgaggctggcttagaggtccatgaagacctctgctatttccatgcttcctactctaccatcccagaagccttgggacagtcctcatggttcctagacatgtccagcacggtacatgctaaaggctagagcctttagctcctcttgcccggagaaggctgtagctaggggctgaggccattgcttaacctcttcctccaagaagacctgggagatgggtgcgctgagtggtctgcctcaccagaacaacttcactagctctttcttccatcgtgagagcttgacctcccagacctgacctccacgcttgctgtttctctactccctgcctggatgtcaccccttttctccatctgttcaaaaccatcctccctcgaggctctgagatgataccataatgtttaaaattctctttcatgacccagtccatactgtctggctgctggaacacatttgcagttgacagaagggggctgacagtctccttgtgggactaggctgtagccagtgtccctttccgacgagtgccagggcttagggaaggtctacagctgggtaggaagtctgggccaggcatacagctctgctatcgtaagctgtagaactcagccacaggatatcatctgtcaagtataataattatggcggggaagctgagccgttctgaggcaaagaccaagtgtcaccacctagaacccatgtagcttgcttctcccccatgggaacaccagtacccacccaggtagacagcagacacatagtcaatgcctctctgcgttttcaatcccacgctttcttttacgacgttctgtattgagaacatctaaaagctgggctcagatgcaggtggttgttcagccccaagcttatgcctcccaccccacccccatagccccttctctccccctccccctcccctttacaggctctctccacatgcccctcatgccgcctaggtggctgccccagcctataaatcaaaacagtccctggagacctttgacctaccccagatggcaatcctttaagctgtgttcagcagcccccagtgctcgccatcatccctgccccctccttgccctgggcttggggcttttgcaggcagctgccctgtcaatcactgattgtagctgggggctgtgaccactcttaggttctccaaggcattgtggctatgcttcattaagtcacacaaagatctcctgagggtctgcaatgtgtgctttcgaggccatagttagcagcctggctcattgcccaaatgggcacagcccatgttcaggccaccctcctctttctggaagccctccttggccacacactctcctggtccctttgtgtgtcttcatttaggcttcattctttctataaacatttactttctactttctgccagggttcaggagagggcagggcagtgtgcttgttactaggactcccatagaaagctctacattggataaccataggaacggggctggggtacctgaagacccagagcatatgggaactctgaagatgtaccacagcttttgtctccagggcagctttccccagactggctggatcttgttttgttttgtgacaggatcgaaacttatatcccaggctgtccaggctactgtagaactctgagcagtcctcttacctcaccccccacccccacccccagtgtgggcataacagggctgactacttaactgcaggagctggcctgggtggacaagctggtatttgctaaggagatgcggcattctgacagcgggaacagctcagggggtgagggtaggggtggcgcaggcacaggggaggcagcctggtggggttcaggatcagctagtcaggaaacatgtcctacggtgggagttttgaagggtgccggtggttactgagtctggttgctggtgatccaaaccactaatacctaggtttaaacaaaaacgggatgtttgcatttctttcacgtaagagaagtctggaggcaaggcagtctctagcacctgcttagactgactggggcgatggttctggccgtgtcggtggctggtgtgggacaggacacttttgtacttacaaccctgaatgatgggtttttctttagaagcaaaagtttggttctgcccagtgagcaggaaaatggaagtgaccccagagctgagatttaaagctgtgctgtctgctgacaaagagccagagctacagcagagggtggggccgggtgctgaatctgctttctgctgggcggcgggagtggccagtggtgccccacctcgcaggccctctggacccagaaccctcccggaggcctctcttggaaatggatgaaggtcagggggctttcacactgatacgacctgttattagcactggcttccaggaaagctgtcacccggtcattaggggacacaaaagagcccagagtgacaggcaccacaaaagcatacatcatggaaaatcctgcccactgggccatctaggagccccctcatttacggggtgctgcatccccagattgatgaatccgtacatttgcagaccacaccaggccctgggtgttctgtgttccttcccaggccgacaagctcatgacagaatttaatttataacatagtcaccataagaaattagcaacacaacagacccaggtgtggcagtccacacctgttaattccaacacttgggagacggaggcagtgggattaccaccaagttccagtctggcttgcgctacagttaagtctaaagatgacaagaacaacgagatgtcaaccaagatgagcggtgacatagagaggcaccatagtaaatgttgaaaacgtctctgcgtttgtgagcgtgtatgaacagcttactgctggggttttccacggaatcttcacccaaagaggacacggccctgaagaagacggaaccctgagtaagggggtctgtttgacttcaaccagtttagccaaggttgtctctggcagcaagaagaaagttgacttttcctgctttttcctgcttttccctgcctttactttgagtgtgtgtgtgtgtgtgtgtgtgtgtgtgtgtgtgtgtgtgtacatgtgcacatgtttacatacatatggaagctgaatgaccaaccatcctcccaggccctcttaatgctttctgaatccatgtgtacaaagacaagaagtctaatgccccctgcgtgttctgtgtgtcctcacccctgtggccgcagcctgctgtgcccttcttcagacagtgtctagccaacaagatgacgccgagatttatagaagttaacactctgtgcttcccccaacccaggacacaagggaccttgtacggcagttctgagaggcattctatatcagggctcaaagggcgtcgtctaagggagggccattgtgggctgctttcttgcttgcctgcctaccttcctggtctccccaactcagttttatttccaaaggttctctcccaaagctactttttcctagatcgtctttgatgtaatccaagctaagactggccttctggagcagtttcccatggagctgcacagaggcagtccccatacacgtgcttggtattcagggcacatatagcgctggactcccccatagacagcttgcttccctggtgactgaatgagactctgtaggaggagtttgggaggctggtgcccaggcctttctgacagcctcagcctcccacaccatggttgagactcgtccagctagatggtgaccctcaagggggggggaaatctgaggaatccttgtcccttctgacaggtcagtatctggccccagcattgatcaagtttcccccacctttatgaagaagaacagagtgcaccaccccccacccccagacctggtccaacccacatgcccagcaaaacagtccagagggatcccaggtgccactgaccttagaaacgggaggaggcctggggtgggcagaggtggtgatactgtccatcctgccaagtggggcagagtcgggaggagcctgggctggcaggaggatgaggctgcaccagaagccagagtctagggtggggcgtgagtgagtctgaacaggtcttgaggctcctttgcctggaccacagccatatcaccttccctttcccaatgctagggatggagggattgatggaactcacatgctagccaggcaatctgccagtgacccgggccatgaccttcccaacaccccggccctatagtaaagactcatagtcagtggatatcttggctgcaggctgatgactgccagcagcctcagggtcagccgcccaacgagggatggatgcgtttggaccaagcaatcccttattttcaggggaatttgtcaaaagcttgttatcgttgaaaaaccaattttcagggatttcacgggaatcagtccaaaatctgtgggtgttgacagctctgctgttaatcagctctgtgaccttgggagagtcccttcaaggcctgtggcaggatcactcttctcgcttcttacaaagccacaggctggtcagagcatgcgccctgcctgcgggggtgagtgatactggacctgtccccctgccaagtgcttctgattgaagaagctgagcaggaattcccatcttacctcactgccctgccctgtgtgtgtggtgtgtttgtgtgtgtgtctgtgtgtatctctgtgtgtgtgtctgtgtatgtgtctgtgtatgtgtgtgtcttcccaaattaacccctccccagctctctccaccatctagttcctgtgtggttgggttttacctgtttttgtttttttaattttacaaactttcttatgtattgaaaaaattgcaaataaaaccatgtaccaacacaattcactttatatcccttttcacactggttttcagtgcctaccctcagtctttgctcatcctttacgggtagcctttattgttctctttacacacgtactgtgcttaagtctctataagcagtgttggctacatccccataatgagggagaacacgagggcttttttctttctgagattgtgtgacttctctcaatactatacattaaaaagcctgttagtgtttctgaaacttttgcgattttgttatctatttatttattttagccctaactagtattccacttacatatgggctaaattttcattagtcacccatctattggtggacaactaagttgatcagttctttgctttagtaaataaagcagcaataagcgtgggaggcaaatagctctgtggtaggtgtagtgttcttggggtagatgcccaggagtcaagtagctgggacatatcgtaattctattttgattttttttaatctccaaactgatttccaccgtgcttatattaatttttaatccccactaacagtggacccctttctgtccacatcctctccaacatttattgtcagatttgttgatgaaagccgtctgactgaagcatctccaccatttagttttaattggtgtgtccctgatggctagggatattgagtacttgtaaaaacagttattggccatttgtgtttctttgttttggaaaactgtctgtttacttcatttgcccctttgttgattggcagttttatttctttgctgtttaatgtctgagttctttgtaaattctggatatttaccccttgtttggtgtgtagctgatagagattttctcccatcctgtgggctatctgaatgctgagcatttcctttgctttgcagaaacattttatcttccagtgctccatctgttgattgctcagggctagttgccggactgctggcattcttgcctaccccagtatcttgggagggtactccctacgttttctatgtttctgtatttacagtttcaaattaaagtcttttccattttgaatggacatttgcaccaggtgaaagataaaggtctaatttcattcttctgcaggtagaaatgccattggccagcagcattctttttgttgttgtttttaatttctgggtcctgtagtgtgtcccattggtctgcttgtctgccagtaccagggtgcctttatcactatagctctgaaatgtaatttgatgttgggccttgtagtgcctacagcagtgttcttactccttaggactgttctggctacccctggtctcttgtggttccatgtgaattcatgtgaatgttgaatgcaatgttgcaattttgataggtatcgccattaactctgtaaattaagacagaatgaatgcctgcttgttctgcagctatcttctgggtactttctgtataggatgggcactgaggatgtggaccagctgggacaaacaaaccagccacagctacctgccctggggaagcttctacgtcactggtagagatgggcagtcggtgtaagcacacaacaaaacttcagctaatgataatcattctagacaaaaggtcagagaacggaatataggggctgctggagctgacagtgtaagtagttacagacagcctcattgagaaggtaacattgagcaaagaacccaagtcgaagagaggaaatgagtcgtatggttctctcaggaaaaacgctgtcatggcataagaacctggatgagatgaggtatggggccagagaagagccaggcgcagagacaggaaggccaagtgtagtgtctgtgagtgggactcgaggtctccgcaaactctggggataagaaatgacataataagctttcagtttctaggggtagagggcaggaaatcactttaacactcttatatggtgctgggaatcattgtagaagcagggaggcctgctcagaggctgcactcatacagtgagaatcatggcggctagtcaagagacccagggaaatggccggatgtggatgctggatttgatatgaaactgggagaagaatcaaggctgacgacaagaccttgtgtccaagcaacccagacgatggagttgcattggaggactgcaggtgggggtggctgtcggagctggacatccacacaagagggtcaggccatcaggcatcccaaacggagctgtgtaggtagagggtcagtgtaagatgcttcatagctctgctggaagacctaggtaggagtgaagctgctataatgcttaaaacccaagcctcggtttctccttctgcaaaacagggtcaggccccagcaccacccgtcagtgtcaccgtagccctgtgcaattgtacatgtgcgcttgttgccaattaggagaggaataatcatctcaaaagcacagtgctgcctcctttgagttctccatctttgagatccacttgccacactggacttgccacacaggtaaccttcgaaactgctggagcaataggacttaaaggtctcccacatcaaatcagcgagaagcttaggatcaaagacagagggaggtgctgagtgtccactccataatagtctcagcaaggacttctatttctctggtccctgcactacctgttaacactgaccagtggcttcgttaaagaataacaagtgccacttagcagcaaaaaaggtggatttaagctttgcttacggttatgcccaacagcaatactgtaggtggcacaggggccggggtcattctctgtggctgagggacccagtctgagactcatggagaaggtgacagtgcaacatttgtaacttctgcgtcactttcctcttccagcgcagacctgcagactgctccacccacatggctactcagtccatggagagccaaacattaaggaccatgactccggaattcttgagggagccagaaccagcaggatggggttaggtgaagcctgggattgcaggaagccggaacattagttttgaactagatggagttgcgttcaaacctaagtgtcccttctcaccaggtcagagacccggtacaagttattgtatccctatgcactttggcatcctctatgcatgtgccagggtgacactgggttcttttgcacaacttgagacctggaaagtgacagaacctgataaatagtggctatcaccagtgccatcagtattaacattattagcgctgggaagagattctttcagggagaaatcagtctaagttctgtcgtcttttcctccactcacctgcctgttattctctaccagcgacaggtgaccagtcgagaaggactgatcagaacatgctatgtggaaaccttcactagtgacagagccagtgtctcctcagacctgactgtagctttacaagaagaggctcaaaccagaagccagcatgtccttgtcaactgacacagagtatatacccccatttcccctgccacccagagcccaagccatgccttgctgaacttggactaaatgattgtctcctgacagctcctctttctgatcacagccctgttctgtaccttggtttcttctctaggcggtagagatgagcaggactctactctgggatgccagtaaaagatacaggcagaacttagcaggcagttgaaagtgacctgtgtcatcctggcttgcccagctcttggctggaagctggatgtgttctctgtacttcatggcagctcctgccacagcctcaccacctgggagcagttggcatggtcacccttggaggctggcaccgccagtgtcctcttcctccttgcctgccatgggccactgctgttctgttactcccgtgccttgtcggtgagctttgctgagctgcctctgtgagctccggcacgaggtaagcagagggagcatgtgggaagctgggaatgaatgcatcgttgatgatgaacttggctgtgtccgtctctgtgccggctcccacaatctccttgggagagccatccccgttcagagggcagctggtgagcggaaggctgctggaagacaatccttgagagggccttgatgagggcaggttttagcttgtgcttgcttcaaggcctttttgatttttaattaccctcaaagggctataaggaaaggcttttagtagcaaccatttgattgtattccaggaggaagctagttacctgccaagctgggatacaggctagttgaggcccttttatccttggggcccctgatgctgacttggctgtccccttcttggccagtggccacactctagactctagtggccatacttctcagactagggttgtccagatttttctttatccctgagagcagcccttgttcactgtcatgactaaacaccccccaggtcctattcttccgggcattaccctaagtggtttctagcccagaccttgtactctttgcatgagctagcctgagagtgcccctgcctgggcttgtctgtctttctgccttcatatgaggcgccgtcgtcctataggaaatatggagcttttgaagggtctcgccttggcctgggaagacaaggaagtgtttagtcacagggaagggatggtatggagtccaggcctggccagctaggatgggattctatcccctggtaggttgaactctacatggtttctatttgattttgcagcagggaaagaggttaaggttaagatggaggacagggtgaggaattaggcaggttggaccagggccagggccgaggtgcaagacagtggagtgaggcctgttgaaggataaagcagagaccctcccagggccactgcatggcacatgcctgacactagtcacgaggatgccatcagacctgccctgcaccctgggagggagtcttcacactggcatgttcaggaagggatttccgggctgctctgaggggaaaatgtgaggctctaagcgcctctgcagctgtgtcctctgtattgtttggacccctgcctggagtgccatggctacggtgaatacaaacgcataaagtctgagcctggcgggagctccagtgaactcacacaggcctgcctgcccacctgctccctgcccctctcccccccaccccccagctccactagagtgtgcaccatcaacccctgtgttgctcctgtgtctgatggctctgttgccagttggaacagaccctgggcaggtaggctgcttgttggtggttgttaaccaatgccagggggggcttcccctagttgcctaagagcatctaggacctggaatgcgaagctctctaggaggtccaaggagcatggaggctagacagtcctaagggcagagagccactcttctaccctgagggagggaccaggatgtggccctagtgtaaatctggggtctacttggttggaagccaggggactgctccaacctgctctcagagtcaaggcctggaaatccctaatagattgtatccagggtcagttcagagaccaccggggttctgattctctgttcctgtgtcctctgtctagtctagcttgcactgaattcatatgtggacgccctaatatccagtgtctcaaaaagtgaccttacttaaaaatgaagtcattgtagttatatggtgagttaagatgaggtcacttgggtgggccttaatctctctgactgatgtcattaggagatggggagacttggacaaatatgtagactacatgtgatcatgaaggtggaggccagacagagactgacacttcgtcacatgtcacacatttggggacagcatcgtaagtgtgttacaatatataaatctagccacagtgggtgtgagctcagtggatccagtcatgagttgtgtggaagtgcccaacagataattccactaaatgtatatttattttaactttgcaactttctatctttggacccaccagttctccccaggtttcactgtgttttaaggtcctgggaaagcgacacttaaggcttgtgtctacatggagtggcttgtagctaaggtgggcagcactttcccctgactcctggtcagctgaatgtaccccactgatctttctgtgactacttctcccatgcttacttagccttttgcggtctgtaagtggcttcccaatttatcaccctgaaataccatttctctttgtttccacctccctgatgtctgtggtagtgacaggagccaggctacctgcagggctctcagctcctgtgtgagccactgtctttctgttcttacagaggccatcactgcagccagccttggcctctgttgacctgtcattcgagggtttccgttctcacagttgttctagtctttaacgagcctagggtagaaggaaccgaactatagactagactagacgcccaccaatggcctgaaacctcaggaaggatgcgtatggagatgatgtttctcaccaaaggctctggttcccttctgacgttgggcatagaaaacagtttgacttcctcctgttacacgagggacagtggattctgctgtttgtccataggagacagattgacctcccccatgacacaggacaggatctgcaggttccctgcacctgagagggagagccagacaagcaggcgacacatgcctagtaccatagagcaggtcagtaagcttctaaccacgtagcaaaatgatcatcttccgtagagagaatatcttgtgtattgtatggattcatcacctgtcaattaaaaagcctatggcccatgctggcaggaaatggaaggtgggacatccaagaggtgaaagaattctgggatagagccaggcacaggaagatccgcccagaagatgtaaggagacaagacagatgtatggtacttgagcacaggtagccagccaagtggcaaaatgggttatcttaagttatgatctagtcagagaagaccctagctatgtggccaaggtattctgagtctgagtcttacttctgagagcacggggggggatgggaggaagaaccaggcccctgacttctacaatgttcaatgagaaaacaaaaacaaaaacaacccatggtacctaagtgtttaatgcaagattcaagaaataaattattcataagctttaaattgcatgccattctgagtagcatgatgaaatctctcacagtccactctagcttacccaggacccgaggtagccctttgtctgctatctctatgctgtgtacctccctgcctgctagtctctcgggaactgtcaaatcatgggatcagctgttagggacctaccctagtgcctgttcaaggaatgcttactttccagaagagtggctccaaagtggcaggaaaaggatgctagcaatctggacttcctacaaagaatgtgttaagtccttcttttgagcaaacaggctcaacttactaagggaaggaaagcaaaggatatagtgagattgctaaggtgtatgaatgaatctgtaggatagtgagagagaagaaagcaattgctgtgagcctggctgctacacctcagaccccaaaagttagaaccacagtgtctgggacatttgaggtggaaaaggtattggatcactgggctctgtgatagctgatcggaattaccaactcaacaaggtttagaatcacctaggaacaaaacgttggtctggtctagagtaagattgttcccagagaggttcatctgaggaagagatatgggtcacatcctcccatgggctgggatcctgtactgaatgaaaaggtttaaaaagcaaatggaacattcctctctctgtgtctttctctctctgtttctgcctctgtgtgtgtctctgtctctgtctctttccgtctctccctcctgtctcccttcgcccctacttcttcctttgtctctatgactacaaacacaacgtgaccaactgcctctcatcacaaccagagccccaccatgttggaccgcaagacagaaacaaaccttttttcctcgacagaaacaagaaaagtgactaacatggtttctgtcctgtggcttcaggcatgcactggggttctcagtgttcacactgatgctaacagtgactgtcggcgaatgctcactcctgagcacgtcacatacatgacccttatgaaatcctcataatacataaaacaaaaacagacgcagggcagataccagagatgtcaggtcatgggagctggcctcaggtccattctttctcattagactattttcttaccagtcgccttagttactattgctatgaagagtcactatgaccaaggcaatgtctaaaaagatgcatttaactggagacttgcttatagtttcagagggctaatctctgatcatcgtggcgggaagcatgacagctggcaggcatggcactggagaggtagctgagagcttctatcccattcataaacagcagactgagtctggactgggcttttgaaacctcagaccccacccccagtgacacacctcctctaacaaggctgacatcctaactcttcctgaacagtctgccaactgggaaccaaacattcaaatatatgagcccatgggggttattttcatgcaaactaccacatcagccaatagatatttactaatttgtgttgaaaggccaagtctcattggtgggtctgtccagtcctgtcctgagctcagtactaaatggctttaattactgtaatgccatgattatatgtgtcaagagctggcagggccacacccaagtcatttctcagagcattgttttccgttccttcttttgtatttacttttccagataaattttaatcagttatggttaaggtctccagaagtcctgttggtattctgagctcacactgtgtttagacattatccttgggcaggggtaggggggtagttgacgtatccagtcattgaacacgcccatccaaacataaaatacaccacttctttcaagctctcagttttggccttcagcctgtctacattgttactcttatgagtcttagtcaattcttgtccttataatagtcttcttatagtcaattcttgtcctgcttatccctaggtggttcatctttgtgtttttattgcgaaaagattcctactttctgttatacttcttaaactgttgtttatctcggaaggaagcagatcctaccagtcagtaatgaactgcctctctgagttcttattcccttagttaagctctcttggagttctctagggtggtccaggcatactgttgtattgcctatagataatgacagtttgtctccctcctcttacctaactgcttagataccagaactagataatggtagtgtttgtagaaatcatattgggttttgatgactaataggtcactatttggttgtactgtaacttcagtgtcctgtactttgtacactgaggtcattgctgacttgcctctttagaaataacattgcacagaatgcttttcttgcactcgttccaaccactgaattcatttctgcatggtaagttccctagaagtaaaagatactaagccaaagacagtcaactgtcttgagattgtcagtactgaatgctacctgatattccagaaaagatttctctgtcctctaatctaaagtatgcacttcctagcatctgatggcagttcgtctcctgcagaatctcaggactggggaacacttccttagaggagaatttataacccatgaagttcacttacttgtattgctggaacagggttttatcgtgaacttagatttagcaaagaacaagacttggcatcagagctggctcaagtctagttccctgatttcacttgagctgaggtctaaaacacattgccctggtcagcctccttccaagagtctccttctgtcggggacaggtgtgaactacacgtgatcagacatgtacccagcattgtcttagatagcccaggctcaagaagccaccatctgcggcagcggctgtgctgaccacatgcagtggctcctatggccacctctgagctgtactcatgtctccctctttccttcatgatttcccaggaagtaagtatcttatgaacctagcccatgcttccaggatgacttcttctccctcataaccctcatcagctcttgcttcacataggcagaggggctgtgaactgaagtccttcaagaccttactcagattgtagttgtagtgaatcaagatgagatcacttgggaggcattaatttctgtgactggtattctcaggagacagggaaatgcacatgggcaatcataggaacatgaaggcataggccagagaccagcaggttgcgtacatcagtcacactaaacatatacagttggcgagccactggaagctagggactaggcacagcagagtctccctcacagccttagaagatggtgaccctggccatgccttgactttaacctttgagcctccagagctgtgacaacacatctccgttgtttaatatttaatgtttctgtgcaccgacctgtgacattctttggcaccatcaggaaaccagcccgtgggtttatgtgtaacctctctaagcaaaggggccaggtgcatgagcgagatggccggagtagtaggtgagtctcagggtggggtggagatgaaaagggaagggagtctctggactgagtccctcaagttctggggtctggtagccctgggtgtggccagtgcctaggagatgaggggaaagaaccctgggcactcatggcacttggagagcaaccacatagcggcctgctactgaacgcatggtgtaaacccaacagagagtcccaatgaagtggtcaggaccccacaaaggagctgctgctctgctaagctaaacaaggggtagagagtaccttcctctaaggcctgtagctataatggcttgctgtaagtcaagggcactgactcagagaaacactacccggaagtatatgaaagggcagtgaaacccaatagcccagacctttggagatggctacatcccctactggctgttcgataattcccagggccaagcaacccaaggggtcatccttccttggttctcctctgcattctaggcccttagtctggcgagattggggaaattttgaccaaaaataatccaaggaacttgtcttcctaaacacatgtgcacttttagatttggggataccagcctgacctcattcattctgtagctgtgacaaaggcttgagagtccacctgtctatctgggccatgttaattctggaaccccagacaaatttctcagccatcccagacccctgtctcagttctaaagtggaaataacaacccacacttactatagttatctgaggtgcaaatagcataacaggtagactaccagcacagggctagcgacctcaggaggtgatccctgctaaggactcttggagtaactcacttgctatttctcctaagtgatggacacatcagctcttcccaccatctgaatattttctacctttctaaaaaagctagacagctagcctcttgctaaacacaaactatgtcaatagtgcattgtgggccttaaatcagtcctcatggccctccactattcattcccactacctgctgtggctcactggagacacttcagggtctccctcatgcttagaaggacgcttgccatttcacccctgagtcctgggatccacagataatcctccagacatgtcagccaggcagcggagcacctggggctctcgtgtggcttatctgccattccagctcctcctgctcccacgtgactcattcattccttcatcaaacggcaagcagtgggcaaggaatgtgtaatagtttgaatgagatgttgtctcccacccccaacaccccaagtctcaggcacttggtcttcagttagtggctatgtttgggaaggcttaggaggcatggccttgttggaggaagtatgccactggaggtgggctttgcccagtgtctctgcttcctgcttgcagttcaagctgtgagctctggtggttaagggcactggctgctcttccagaggtcctgatccaattcccagcacccacatggtggttcatgaccacctatctataaagagatctgatgccctcttctggcatgctggtatatatgcagcagagctctcatatacattaaataaattaaatttttaaaaaatctgtgagctctaagcttactgttctagttgccattgtttcctgccatgcttttccaccatagtggtgatgggctcctgtcctatccctcagggactgtaagccccaaataaaccctcccttccttaagttgtcttggtcatggtcttttatcacagaaataggaaagtggctaatgcaaaaggtgtgtctgggtagaaagaccaagggatcagggttcagacagggcttgagaacaggtagcaggttggagtggcccagacaagtgaaaggcacagtcactgcctgccaaagtgcacttcactgagtgtatgcttcatgctggctcctgtgatgatgcacgcgacagagagaggggatgccagccaaggaagacacctagcagggaggacaaatagcccaagcaattgcagaaaatatcatgtagttacttctatggtgatagcatataggagaaattgtggtccagaagaggagtataacaggagcctggtctgtcctggggatcatggaaggctaacagagggaccttgtgagatacagaggcagatttacctagtaagagtctgttaaatgggatggggagagacaaattattcacattagaaagatgagcttgggcaaaggccctgaggtaagattacagggctgaggcggtggcggtgggtggcatgcagggagaatggtgggaagcaaggccgtggagacaagcattgctccctgaatgccaaagccagcgtacaagaagtaaaaccttcaacttggaagagttttcaatgaggatacttcaggggaagagtggaattgtattcattattactgcccaggaccaggcacggcacctccgaatgccttgcggtcagaatggctgcacaaggacagcgtcaccaaggagagtttagacagccacagctcatccttgtccctgctggctggactccagggttcccctaatcctcctgcccaaagcccctgtatcccgtcagcctgtgctcaatgctagctcctcaactggaactgtgacatggaaggaggattccatctcagcctatatcagatcaaaacaaaacaaaacaaaacaacaagccagaaatatccccaagtggctgtgcctgtcctatgcgttacttaaatctctttgacatctctgtctttccaagatcagggattacaaccactctttgctacaaggctatagagtccccgaaggtgtcaaacagcatccctctaaagacagcagttggcagatggtgccaggtcatgcatgctttgagcccatccggtcttagtccagtctgcccttccaaaatgcaattaatcctaagcaggatgccacagtggagggctggagagaagccacacccccggagcaagtcactcaggacagattcctgagatactcagggcaggcacgggtggccacagcggggccctaactaagcaagtgtggacacaggaacagatttagttgctcatgcccgctagagtggctgggaaagttcctcggggccttggaaggagcttgcagtctgtttaagtctccccagaagctctctgaagttcacagacaagcagctcaagtagacacttgtggttagctgcctcccgctacagtcagagaaaaagcatcaagaacgtgagacagtgaagccagaggggccccagcccactgctgctccgcagtctgactacctgcctccaggaagagagcaagaaccttttggaatagtcatggaaggccctctgaagaagcagccccaacctcagaagccacacagagcaaggcgcggtaccaaaagtgaccttttccccttctgatgctgagccgtccaaaatggattccattatttagaggggttgttttcaagacgagggcacgggcattttagcaaatccccaccctaagagatcaagctaaaaacacactggttgcttaagatgagagctgatcaggaaaatccacggatgttgaaagggctctttctccagcagctttcagtcagtgaggtgtcggtgaaataaataatcctggcattaagtaataagcctcacccataagggaatgattaggggctgagtgagggatacaggcagtgagggctgtcagcttgtggataggaccagtctctatgggtgcagcgttacaggggcggcccttgtgcaggcaaaaatggtccggggtaaagatgttccaggcacaccagacaggagcaatggtcggaaggccagacagtcctcacttcttgggggagggggaggaagacaagagtctggcaggagggaacttgtaggtggattctatgaggggagcctgctggagccagccagtgacccggacactgccactctgtggacagctcctgggtggttccccctgactggccacagaagcctctttgaggcctcccaggcccagctcaaggatcccctcggcatggcccctggtggctattgcttttggcagccgaggatctgcaggtccgttagaggtgacggcggcgtggcacagttgaaatgctgccaggtcccgtggtctgcacacaggtggccggtgtcaagcaggccatgctgtctgcggacctcactgcccagacctgggcaggcttgtgaggcatccttggagcctacacaggctgcgtggctggcccagcacaagtgagcctttgtagccctggtttatgaaaccagccacatatttccccgtcactttatgaggtgctagctctgcccatgcaagctgaggaaaataaagcgtcacatgatttgtaccgctacagtctgaagtgaaccagtgctcccttgcagaagtgctgtgctctcgaccaaggccttgtggctctactagggggaggggcagactcaagatttcacccctggcgggacactcctgtccaagccacttggtggagaacagagaagagacagaggcagtgagactggagggtggtgtcaggtaaagaacttgagactttagcatcgtgttctcaaggctggctttcccacaggtgagggaggcccttttaccttttaagagatccgcaaggcacctggtgggaatgctcttgcaaagtttaccacaaggtaaagagcattccagaagggctctggccttaaaatacctggcaggaagggctttgccttgcaattgaaaaggattagtttcctgaggtgtgtctataggtagccacccatacactgtgaactgtgatttctggcctccccttatctcctgctccttttgtctttacctgtcactggtcgggtacttcctaagttacatagagtatttcactaggcacccacttgcattaatctgtcctgtgtgcctcaagaaagccctgtgcagagtgcgtgcacacacacacccccatctccctactccaccccccacagtgcagagatttgctttgagctcagagataagtgacttgctccagacacacagctagaatctggcagagcttcgccactcagggttagaaagatggccataggatggggaccgaggatgcagcctggtggtagagctcttacctagcgcgtgcatctccctgggatgaatccctagcacagaagtgggagaggagggttagtgtagaggagatgaggggaccatgtataaaaaccccaattataattcagcggctcgctactaaagcgatactcaaattgatcatagttatagattctaagtaccctttgagctgaaaccgaaaagcatttgcatgggagcaaatccaaaatgcccacttagaataacacacaccgctcaaggtaactcctcattgccacctggtggcattgcttttgcattgcaggggcgtaaatacgagcaaagacagctacacctcagcctggagccaatgggagagacccccacttgaaaactggagcccaaagttcccattagtgttgtaccctggccacagcagtggaggcaggctaccccttcagcttcctgggtggctcatctttagctatgcagccctctgtcgactgacctcgctggagtcttcctccaaacccagagctcccttgactcttcatttccttcctatgtcacagtgaacaggaagagaaatgttcaggcgacgggctttgaggctccggtggtgaaggccgtggagggttttcacaagttcttaacccctttctaaaagtcacactaactcttccaacagtgcccttggcctggtcctcttctgctgtcctctgatcccagaccccttaggtcacttcgcatcccattccccttgtgatggttaatctagatagtcaacctggccaagatgatggcaagaacctagaattcacagagctaacctctgagagggcctttccaaacaggactggtagagcaagtgggaagggaggcccaggtaggtgtgtcactattcactagcccagaggctaggctggaaccgaaggggaagagaaagctaatagtcaggcgacagtcccactcttccagagccaatgtgtctgttgccccctggacccagtcttccaacacagacacaaaggcaatgactatgtctgcctctagagggcagagcagggatgctaccgtacttcatcagactcacctgtgattctgtagttcaaggtcagggtccagagcaacctggcacagagggggatatttttttttctcttataaggaacagaacccataacccgcagagccacagttaagaaaggaaaaggatgtgttttctggaagactagtgctaggctaaaccttgttccggcctctctgcctgacgtctgtttttctctctactatagctccgaacagttctggcctcccctcccttctggttcattgaggcagcttactgaacttcaagctaccatgctctcaaaactacaataaaatgcaataaaatgacccacggagaggctgcagagatggctcagcggttaggagcactgactgctcttccagaggtcctgagttcaattcccagcaaccacatggtggctcgtgaccacctatctatctataaagggatctgatgccctcttctggtgtgtctaaagacagcgatgtactcacacaaaataaataaataaataaataaataaatctttaaagaaagaaagacccatgcaaatatagtgttccatattgaccttagattgtctgccccaggaacccattcagcacgattggaatcagatccccaaacaactctgggccctaaggaacctcaagtttgcatcagcattgcccagtgtaagtcctatagggcacactgattaggtcccttcggtcacatggccaccctgaaccaatccccgtggccgctgcattggaatgtgctggtttgctcaacttctttcagggctgagaggaagtccaacccaagtcacccttgaaggcgcctgcaggagtgagactgtgaggaagcagtgggcaaaaatcatagaaagccatcagtaaccgacataagggttagcaggatagacgtttataaatggtttacattgtatttatttacattataaaaccacagtgaaaatctaggctggccttggcagtgccatttcattcatccaaagggtggctttagaggtagaggagattgtctgtgttctgtagcctgcctcctgctctcctggctgtcagtttgaacagtctagttgaagacacatcccccaggtgtccttacttagagacctaggagggagggatttcctcaggcttgtgagtacccccccagaagtgcctgacatctgcaccccatcctagaggctcatgatcttcttccattccctcttttggtctcctgatgggaagtgaagatttgtgtttgttcatagtggcctctcactgttctaccccactaagattagtgttaagccttcagatagagtgggatctactggttcaagccggtaaccctagcaactcaggaggctgaggcaagaggatcacgtggatcaggcccaccagagactcagagagagtgccagcctagcctgcataacttagtgagaccacatctcaaaaccaaagctaagaaagacgtctaggggtgtagctcagtgacagagcccttgccgagcacaggaggagccctgagtctgatttccactaccggaaaaagaaaaatccctacacaaggtcgaggtgattaggttcttagagactcatggtcctgagccttgtcctaaagatgaggtctaaaaatgatctgggtcttagttgagtcacataatggattaaattatagaaaccagggacctaggcttggtagttctttcccatggatggatggctaccacaggcacccagcagagaggcagcttaagtgaagacccccaccaccttcccatgggcattcttcagaatgaattagcacggggtcacagactcatgaaaagcccataagctcgaatctactgggtttaattcctgccaaaggggcttgctcttccccgtgcctggctccagatgttaataatctactagcctggcatgctgatgaggccagaggtgggatgagagcaggagccctagggtctgggtggatgatcaacaagaaaagcaactgaacaatgagtgcactatccctgcagaggattgtagaggttgtaggattgcagctttctgttcaaaggccaccaggactcattcagaggtcctgcctcaaagagcccccagctcactggggcagctaccgagttaggattggtcagatgagcattaataaagggtaggcagtgcagtgaagagagaatgaccatctgggcccccgagagagaactgtggagggacacacggcaggaatactggaggggacattgaagagactgcttggtggagaaagccatgaaaggcttgtcagaggaggggtcaggtcaggatgtgtgaaggcacaaaggcttacaaaggcatagaggctttaaagagacactgcagagtgccagagatctgagcaagggctcttagtgggagggagagtgcagcaagaccccgagagagttcagggcagcggaactcctaatgtaactggcgcgctttacccgtcaaaacctgggaatcttgacttgggtgtggtttttttttttaatttctttttttccttatttaaatgcatccataaggtttaatttaaacatgacaatcattaagtctgcccactcctgtgttctgccacctccccagaggccactgaagcagctggatttttgtatattcctctcaggtacaggcagcagggtataccgcacaccctgaggggcacacctcggaggtgagtcagcagatggagaatctctgtcttcagttagagccccaggctatgctccaggaactcaggaacctccttcaatctctgtcttgtggcagctcttacacagtagtaggtacagagccaaggtcacctggctattcgaggactgagctaggactcaaaactcagacctctgcctcttacatccgctctcgccctggcaggtctgtttcctgtctccttgatcacagtgtgtcaaaccacgagtggggaaaggtgatgggtaaggccaccatttcttgtaaacattgcaggcaataggctgatgtcataacaaccttcagtgtagaactgtgatttcaggaggccttggtggttgttttgttttgttaacaaccttctcctccctccccctttctctccccactcctcctctttttcttcctcttctccccacctccccagcagccctgcaccaagcctcagctcatcttggtccgaatgtctggtcactatgacaacaagggccttccatcagaaagaggccttccaggtattttattttgggcttcaattaagcaggctgaaggctagaagcaatgcaggaaagaatgttttacttatggccttcgagacaagctgggtgctatttctagctccttaatcggtgttgctaaatggggtcttaatgctagctcccatggcatccagagttttcatcacagagactccctccccaacctcactctctcaacctcctccttaaggggaaacacctcgttttttttttttttttgtttgttttgttttttctagcagctgtcactagctaggcccccagcctttccagcctgacagtcactggccctctgtagcccagcctttgggaatatttgttctgctctgtcacacatctatcaggaattgagttctcaggctgtctacccaagggtcacaattaaatttccagactccgccaacctctccagatgccccatcaaagccagtgtggaatgagggatcgactatattgaagaaacattagcatttttgtgagtgtttaaaatccttcctgctagtacttcctaagtcatgacagatcactcattaaatcaaggcaagttaagtgttttcctgtgcctagaggaactgagcctggaaccaggaagtcaatagacatccattgctatgtgcccttttggaattttgtatgtgctatttaattcagtctttacccaactcctctttaaagggaagattatgaaagatgctgtgtcagagtccattgcacagtggatgctcaagacatggttctccttgggccctaggccggggtgatgaatcaggaaggggaatggactatgggagctgcagccaaagcacaaaggcgtggaaatgtctcagtttgccggtacaaaaccaagtcagcagttctccccgtttgctgcatgtcccgtcctccggtagaggggttctttggggcctcattagtcttgttcattggagcaagtttttggaatgattcacactcctacagtaaacaggtatttgtaaaggtccttggaaaagacagagctttgtaaggataagaattgctgtgtcctcgtcctgattgaatctaaagagtgagctcttcccatctgccagtcttcagcactaccttccttcacatcccacatcacggagctgccaagacagatctaaagtcctgtttcttggaagaccttggggtctttccttactgtgggtacctaggagtctcctgtccaaagccgcttccccttagatgctaccctaaccctaaccctaaccctgattctcttaaaatgccatctgcaaaaggcttttgcccacttggcagaagaggctctccaacctattcactggtggagagccatggttcaggacatcacaggccatggccgccgggctaagactttctcctgggtgagcatcctcagggactcctccctagcccagaggctccctgggtgtggaggcaggacagagccttccttgcctgtacttgaagctgctgaggcgtatgaagagtagatgagtaggtttctagcgggttaaagtagcacctgccgcagtagacgtggcgcgggagctggctgctgtcgtagccctcattgttgtagtgatccacactccactgtgatacagttggtatccctggccgtctccaggactgtgcagctaaattcacagatgtgtcctctgcccaatctcctgaccatcctgtcagtgagcttgcatgggtctgggggtgccagattctgtttccccctcagtcctctggagtggtcaagcaaggctgtggtactggcatggcagtaggacccaacaagaagccaagtttgaaccaagtcaggccaggggacatgctggcaggggtcatcagggcagctgcgacaggtcctgggcaatgaccaaccaaggtcaacaggatcctcagtctgggccactttggggaactggttttgtcaccacctaattagaacatatataattaattttccttgtcaatgtttttcctgccaacatatttgggctcataaacccttaatgtctgccataccgtctctgttgtaaaataagaaataagatgtttgggtctgtgggaaaacagatgctgtaggcgttttatatccactatatcagttttcttgtcattgagtggtgtcttgtagagttcaggtcttagacccccaaagctctgtctgcccttacgaagtctaggtaaactgggaagccacatggtctctctgctggcatttcctcaagagcctggcaacaggggcccacgatcctgcttggagccagacaccggtctctggtatgtgctttttgttttgctgggtgttgttgccactctccacacccgctcttcaggatgttcttaggagactcctggtcctgctaggttgaaacttgcagcccccgaccttataacatatgtgccactcaagctggttttcattcatgcactgggcattaacatttttgaagtttagccaacataaggcatcacctgccccatgaagccagaagtgaaaacagagtcagcgcttctgaatttgccaatccttatcctgcatcctggcgcaggcgcactgctcatcctgacgaacagagctccttgctcgctcctgagcagacacgactttcctcttctggagctgtcttgcccagaaagactggttcctcctgagcataattgaatcttttggctgaggtggggaggggcgagagaagcagcagactggatccaaggatccaatttactcatcacttttgcagaacttaagaaaagcaagcttcccggtttgtctctgagttcacacgtggacgcaaaaaatccattagaaggccttcatattaagcccccagggcctctgctgattagccagaggctaacatggtaacatggtaacattgcctaagtggaaggaagtttgtctgaccttggctatttggaaacggtgccagctagcctagcagttgtgagtagcacaacccaggctgcttcaaggactaaagatgtgttccttgtcactgggactccagggaaaaacacctcagataggggtccagaccccatgtggacccgtttgttaaccgtctgatagtgggcaaaaattcttttcctctgggtcagaacacgggctctcctgccagcccgggtttgctggggttagggccaccttcagtgctaatgcacaacacaccagatgacatcaccacatgaaggggtattgaagagagacaaggcaaaggcgcctcctgagaccagctagccactctcctcagggctggaaggcagattgcttttacatacacacacacacacacacacacacacacacactcccaaatcagacagtaagcactactcaactgtggccttgagctagttacccgacccctctctgcctcagtttcttcacatctgtaaatgggcctacataaaccactgcttcactgcgctgttgtgagaactaactaagatgagggctataaaccacaagaaagttccgtgacgtgggaagtgctgtgtgaaccttcccacctaactgctctttgtctcataactgatggcagaagttgagttcaagagcccagcaaagggtcttgagtgtgtcaacagtcgtgagcccctccaggtgtcctttgatggaagaactagagcacggctcctaaaaccacagcaggctggcagaggctccagtcccagagctgctgagccctggttctcccacatggtagccgttctggcctgctcggatgtgttttgtttctcaacctgtgacttgggggtagactgaccttctcatagggatggcatattagatatttacattacagctcatcgcagtaacaacattactgttaggaagtagcaacaaaaatgattttatggttgggggtcaccacaactgtattagagggttgcaacatctggaagggtgagaaccgctagtttagagccaatctgtggctctcaacacgggctttgccccatcaggcagaccctaccttctacacgaactgcctcattttctgctttggtcccaaggacactggctgctctgaaatattaatagctgtcattgagtgccacaaaggccaggaccttcagtaagtccctggactctgccccttacctgatcttcccactgttccttgtgaagcaggggatgaccttatttaaccaaacggggaaaaaaaaaaaaagcaaccaggtttatcaagcctgaactcaacttaggtttcaactgcaggtcagggctgtttctccattgtagtaatgcctctctctcttaggcaatgctgagttctgttccggcaggagtgacttcattattactcattagctagaattagctgcaattcatcttctggccaagctcttgtttgatttagaccaggactctaattctctcatacagttttgctctctcctcattgctatttttaactgaacttctgatagcgacagagtgcatctcacactactgagtcccagggtcatttccgtcactcagccatgaccttacacataactcactgtcaccgccagtcccccccccctgctctcttttgttgtaacttccttatttatttgcttatcaactcatttgagatttactgtgcatgcctgaatccaccacccatatggaagatcagaacgttgagttgacaaccgagtgcctctgtgcctatttctgtcccttccttcccacactcccctgctgcgtgatggtggctgagttttctgtttactcttcctttgctctttccttactgattttcagcatccatatgcatacctacaagattctttgttcagtttgtctacttacctcttcctgcatcaggaccaccctggattcatggcattgactaacctcccatttaggggacaggtctggctgccccacatgcctcactcttctagcatgggaacagatgcaccctgggaatgggaaccccattcctgggccccaacccaacccatagcaccagctgtctcagagagcacagccctgacccccacccatggtgggcatagttatcttagtatctgctagacagcaagtagccccagggatgtatcagaagaggaaacatggagggcagtttctctctctttgtgtgactagggatgtccttgcccaagaccagcacatcaagctatcctgcatcgaagctctgggacacacacacaacacacacacacacacacacacacacacacacacatgtgtattcacacacacgtgtattcatcttccatcttgtttgcatcagaatctctaactagcctgtgagtttccagcaatctttgtttccacttgccagtaggagtgttgggattgcaggtgcaagctaccacgtccagcctcccataggctctaagcagccagactcaggtcctgacacttgtacggtgatcacagagcatctcccaggaaagggctaccttctattattagtactcattacctggcttgatgtgcttcagtaccttttatagacaagaaggctcacttaagctgcttctgcctcccacagcctgagcttctccatcttaatgaccttgccgttttcagtaagaccaggcatcagggatgatacctggtcctgcctatgggagccagagtttatcgggaaggagataacaaaaaaatgattccatatggacccaagagctcagggtttgatgggagctggggatggggaaaacaaattcccccaaactcctacttaggacaagatctgcaagtagggcagagtatttcaactgcagtttgtctcagaattcttgggcttggtcatcataatgatgctggtcttgctgtggagtgagatgggaagagcagagggacaggttggagctgtctgagagggtagcgtggacatctgaggctgcttcatggtggcgtcggaagagaccgaagggctcagagtacatatagaaactaggagagaacatgagttgggcaggggcttgggagtgggccagggaccctggtatttgagctcaaagtatagggatccaaccagttctaaggaggggacagggcacgggaatttgactccctcaaagaatgtggtgatctctgcagagcaccctggcctgtagaacaatgtgtaagagctgtctggatgcagcatgaacccccagatcccaaatcttagggccccatgtgaaacccatacagatgactcggcaaagctaatgagggtcccagcctagagcgagggtagaggtcccgggtaacaatggccctaatgttatcagagtagcagcaaagcaaatattaagttgaggggaatgtcaacatgaacagcagttggagagattcaccaaagaatgatgacgttgaattgagaacagcagggcattccgtgggaaggctaaagccatgtaaagtatgggtggtatagcaattttcagacaatcatccttgcctaagatgtctctgcagaattgggggctgggtaaagttgtggtggccttggtatgaggcgaggtgacacttctggcgggtccttttgtgcacagttcttgtgatcagccacacatgcacagagccttctcctttataaccaagcgctttatttattgttgttaggacttggcaatggtgacctcacttagattctgacaaccttcacgggcacgtcattcctcccaaggcagaaacatcacaaacgcaccagaaatactgccattgatcgctctgatcagaatttaggaataggaaagtagaagaaagagaaatacacatgtttagaattcctttcatttcaaagactggttttctgtcactttgcagatatatatatatatatatatatatatatatatatatatatatatatatgatatcttttgttagtagagagatttcaggtttgttgttgaaagcatctggctttggccgtgaaccaaggacaggctgaagtagggtttccttctagtaccggcctctataccccagcccagctctctgaagctagatacgtaatagccattcatccccatctctccccaccccgccccaaccccaaaccacgttggcttagagattgcaaaggcccatcagagctgatcacggccagcagggcatggctacacttcccagagcccattcctcctcacagctggcagaagcacagtagctagccgccagcgtctgactccaacagggctgggtatgcagcaaagctagaagtgaacacgcacccaagagcctggccaggaggcagacaaggcctggagacagagacatgatgtacaggctcaggtctgcagatagatagatcccttgctcctctgagaatggccctgtagaccagtgcctaaaattggccttggtgagagagctgagtgtttcctctgagcagtcttgcctctgaagagtgccgctgagagccagcttccccctggggcctaccctgtctacgtagatcctggatatctgcctcttctcagttagacgcttggcaagcacagccctgggctccaaggcccaccccatgttcgtcttccagatccctcccagctccctttgtcctgcgcatttgttcctatgaaacctaagttggtacggttccctaaggcttccactgtcggggacgcagtgcgaatctgtcctgccaacctgaacccatgggaaggcacataggttgtcacagcaggccatttgctgctctggcagtgacactggagctggagaagaaaatcgaggcagccctgccacttgaggggcagagttcaggtcttccattcttacctgtataaaaatggccttccttcccaccagtcatccttcctccatccactttgaagtgtttgctcatgccccattctgctgaccctccctccacactgagcagggctttcccgccaaaggccatttcccttgagacagttagcagactcaggcttttgctagggtggtgatgggaatgccattgccccaagcgtctgactattctttgtagattctcacaatgtgtggtctgtggagctcgtggcttctctgaaccttggttcaccccaagtggccagtgctgtcaggttcactgcttcacgtctccaccaccctgtcacatttgctttatgtcttcctagagtctgcccagctgtctagcctgccactgccttccttggtttccatctctgatgtggcataacttcatacacacacaggagaagtgtgcacatcatttctgtcactcagctgggaagggcaccagcgtagagcccaggctgttccatggagctcactactgtctacccaacaccctcacacttgaacaattctagtggatggggaggaagagagggctcagtaagtaagagcactgctgctcttccagaggactccgtacccacatgatggctcacagctgtctgtaaccctagttccaggggcccagtgccttcttttggcctctatggggcaccaggagtgcacgtggtgcacagacatacatgcaggcaagacacctgtgtatgctgcgtatctcatttcctttatgaaaagccaaacagttatcgcccaggtcttctaagatcagcttttaaggactgtcactcaaatgctttcccatctgcctccgattgactaacacccacctcatgacttacacggtgcacacaggcatgatggtaggctggtggctcacatcttggcgggtttcagggcaggtggggagacataagaagcccgaaggagcagctgaagccatgaactcagtctctgtgccagactctccaccagtctacattcctgacagtgcactctttgagctaactccatgagctaacttaccgttttttgcagatggcaacagagtctctggaaatcctgtggtcctctataggtcacacaggggttagtgacagatgactgaggaaattttaccccagattttcaacaggactgggatgtttatagcataaaactgggcactctgcagctgcctgggggagtctttgtcaagagcagaaagtggttgtccataagggtagcaaactgaaacaatgtgtaacaatgttttcaaagatgcttctagcgctgaccgctttcaagcattcttcagcaagaaccttgttaaggcagagggcaggctatgccatgcgatcgacaccctatcctgaagtgatgccatcctgtcccattttacagatgacagatgtgtggctgggagaggaggggccagctgcctctggctgggaggactgagtgtgaactgggcttccgagccagcctcttctccttttcacttattcttgtccgtctgtgtgttcacacctgctccctgtcccaggagactaaggccctgactcaggaagtgaactccttttttcagatgtaacttttttgaagaatattaggtaaagaaagtgtccaggtcacaagctgctgcctgccggcatcaaggcaagctgaccagcaaagccaaacacaaatctaaaaggaacccctctgcctttaccgccaccccagtcaccaaatcctgaatatgacccgacacgccctgagcatcaccagccatgccctgaatgtcatcagctacttttgaacttacagggttttggggagtcacacatgacacacttttctttcacttaaaattatgcatgagaggctcgccctgggttcacgtgtacctggggccccttcgtgcccagagctgatttgttttctcctctgtgaacagacagagttgatttgggcacccaactggtgaggagcaacaacagggctgcttccattgcctctgttacagtatcgtcagggaggtgggcagctgtgacctggaaagtggccatggaggggggaagggagagacaagagtctcaggctgtggctcacgcagtctgccaggagtctggaagacaggtggctccacctttccaccttcactctggccttgggcccacctttttattattgttctttgagaggggcagtatgacagtctaaatgcaagctttacaactctgcacaagtctctcttctccaagcctcagcttccttctctctcagccaggaatgagtagtcacactgacttcagatggtcactttaagacctcagtgagatacattcacccttgcaacaggccaagcagaagctcagtaaacatgggtgagatagaagataaattcccacttctggttccaggggtttgagtcctggtttttctacttaccagctgtgcatccttaggtagatggcttgtgtactctctttcagacttttcctccttaaaatagagatgataatgatatttattggccccgggggttgttatgagtttttgatacatgcatttgcatgaattgagccccccaaaagaacgtgtgtgtgtgtgtgtgtgtgtgtgtgtgtgtgtgtgtgtgtgtgcgcgcgccgggcagggcaggttgggatacacggctggcattccctgggtagcctccttttgtatgagaatcaaaagataagaggagaaagtgaagctactagcctgcggtctggcctcagcaaaggacagcaagatgtggccttggatgtatcatctggccctcatgcgagtcccacttggattccggtggtggcccattagaactgcacctctcgaagaagttccctcgaaccccagctgccattgctcgcccctccctcctgataccattcccacacagcggaccatttgtgtttgctccttataatttgaccacaatcctacgtactctgttgccaaaagaatgcttagaaccaggcagtggtggcacacgcctttaatcccagcacttgggaaggcagaggcaggtggatttctgagttcgaggccaatctgatctacagagtgagttccaggacatccaggattatacagagaaaccctgtcttgaaaaataaaaaaaaaaaagaaaagaaaagaaaagaaaagaaaggatgcttagctgtagcgcaaaatatcgaggccatatgtcagtcacaggtgaataggaccactgtcatcttctttctccactggtctgtttcagctaccagccctgtccctgccctcagcttccctgtctccctgatccctgatccctgatccctgtctgttttctctacttgtaacactgcccagcctcagtgtgcctataacactcctacccatacttcaaaaccctattcaggtttctctcctcgaagctttcaggaagctgcctagtttctgtccctttgcgctcagaattctttcctatattaacacttttaaaataattcacttgctggggctggagagatggctcagaggctaagaggctgctcttccaaaggactaggggttcaactcccagaaccaacatggtggctcctaaccacctgtatgtaacttctgtttcaggggatccgacacccctcttctggcctctttgggcacaaggctaacaaatgatacacagatatacatgcaagcagagcaccatgcatgcaaaattaaaaacaaaaacaaaaccattcattcacttaaaaatcttaggtcataaggaaatcccagaccacaagctcacctccagggctggctctggccctggctgagttgtctctgtatccctaggattaccacaggaaatgaaagaggaaagaattaatatgtgtatctgcagtgagctggtgtaactcagtaaactgtcctgtatcgagaggtgccagcgcaccacagtgggcgtatggaggtcagagggccactttggggaatgggttcgctcctaccatgttgagtcagagtctcatctgttttccatctctacactggtgtgctgggcttacagatgcccgcagctgcatctggattttttaagtggcttctggtgctcactgtcaggttatcaggcttgtgtggggagcacttttatccctcgagccaccttccaggtccctggtggattttaacttacctcccttcccccgtcccccagaacttgagtgctgtaagaaaatgtgtccttccattgcccatcataaacactggagggaaagcgtgtgggtttgaaagaatctcaatagcctggtggaatctaacctgtctgcttgcttgttttgagacgggatctggctgtgttgcccaggctggtattgaacttctgggctcaaatgatccttccgcctcagcctcctgagtaccctgagataaatcatcctaaacgttttgagccacacattctacatcagaacttaccctggcagtggataactttgtttccactattcatctttaaataccactatttagcggttgttctaaacgttatagtctgagcagctgcagctgcctttcataatcattgctgagtgcctcttactgcaagcagggatggctcttcagtagcagggagcactgagccagctcaggggcaagggtaggcagcaggcaagctaggcggagtgaggaggtgtgggcactcacgcttgcttcactgtctttgcagctgagcctctgccgctgatggacctgtgccggcgatccatccgctcagccctgggccgacagcgcctgcgtgacatcggctccctgcccctgcctcagtctctgaaaaactacctgcagtaccagtgagcggcgctgaggatcagctgtcatctgtggtcacacagctccagagcgtcaggacacatcagtgacttggaaaaggaatgcctgttgccattgctgccaccgaccaggaccaggaggccacctcgtgaaccagagtgtagagaccattatcttcctcaagagaatgaataaaacattgggcaggagacggcatccagttagttccccactgcagacagacccaggaaaattggccagtggagagaaaatgggttctgaataatgaatgacagaagccagcccttgatggtctcctccacgcctgcccctggccagggcagagagactgtcctccattttaagacttggtaccactttgagagatgagtccagggtcccacagcagggcaaaagcacctggccttacctctctgagccggtttcctcatcccctcctgccctcttccgtcatggataaagttctttggccattcccctccccactttattcagggacatgaatctgatgacttgccctggggacagagtttcttcttgggtatgatcattgtaagtagtgtttgcatttttttttttttttgaaagaggagtgtggtgaaggtggctttctcccaaaggtgctaaggaagatggggccctcgtgacaccaagtctgagacaccctgagtatccagggctctggcagccatcattcagggtgaagcctggctgtcacaaagctttctttgagcaaattattttttcactgtaggagacttccagtttgtttctcgtttccaatatgtgtgtgatgcaccgtttatttatcagctggggccccgcggtgtggccttgggactgcaaaggtgggtataacagtctctgcaggacctgagacctatcctctcacagaatgttgctgctgctgctgctgctgccgccagcgccaccatttggcatcttttgtgtgttccaagataccctccacccagactcagttttaactggaaatcatcacagagtaggatacagagccagacagtgcagcctacactgtaatgtgaatgtgacctacaagcaaggaacatttctaataaaagtttgtcattctgtccttcagctgtgtgtaaagtgctctatccatcatcctccctggtctgtccccagatccacagacatcaaacctgggagtgcctctctgtacacacacacacacacacacacacacaaacgtccacattcgaaccccaaccacagagatgtagagacccgatctggaagacactctgtccccaggatcttcaaagactcctataagccctgatgctgaagccttagatgttcaaggtgaccagggtcagtcagggtaaacccaagacctggctctggggctgaatgcagttggccaccagggagcagtgctggttgctgcagagcaaatgaggcagagttaagctgagctctgctggggctggtagcaggttagcagttagggacaggaaggggactatgtcaggaccagtacaggattcacttagcagcatcagccacccatataccacaccacaccagactctagggcagtgtcagactgatgtctctgtcctgggtggggacatttacagtttgttgtaagaccttgaggaactcagcaggaggaggaggggaggggaagagacaatttcttgtgatcagaagagcgaatatgagacacacgttgtctgcccaccctgaggctggagacaggataggaatggcgtctccaggctgcaggctctaagcacctgcctggccactgactgactcagctgccaaagcgttcagttgttgtggttgctaaaagcagcttccgggagaggcacaagcttgggcactggtcgggaagcctgggttggggttcaggcttccttgtttatacacagtcaccttgggtaagtcactttcccctctgggcacaaggagcttgaccaggtagccagtgactgactaaggaccgtccctctcccagcctctagggtccaagtttcagcaccactttccattttggaagaagcccttttgtctcagctcctaagcttcgtggcttctctcattctaacagtgccttccctccctcacttcaccctctcatgattaatgagatcagccttcatctagacaccccataaccacccaccagtgtcttcctgctctgagctatcagttctgagcatgtatctcccggcaccaaggaccctattctgagcacttgtattgggtcctatctgcccttagcctcatggatccagcaggctgtgggtctctggagggctgggccggtgcctatacctacaacagcctcgtaggtcagacacatcagctctgcaaaggcctgtagaggagcgggacagatagaatgtcctctgcaaactgggacacccagaggaaactgcaagggaagagctcaagtagctcaagtagggaatgaggtcctcccagagctgaggaccgacccctaagttctcctaagctccctgtcctctcgtgaccatacctacagcactatcctgaaatgactgagtcctggcccagctttgccagacctcacagtctaagggggagataaagatggcccccaagcaaagaagcagcatggtgttcgaggggatgatggggtgaggtgggggctaggagtcaggctacagaaagccactggggagttaggtactgagtcctgacaaggagctagacaggtgagaggaggcagaacattcatacacatgctttaaaaaacaaacaaacaaacaaaaaacttgaaaaaatgttggatacagcagcaatggataggagacaaaaccacatccagctatctttccataaactacaatcgttgtctgttagctgtcctgtgtgaagtatcctggggtgctgcttctgcacatctccctgtccatgatggcctcaggcccagaggagagcaccctagcctgctatgctgtggctggaggcagctccctggttctaacaggctccaggccagcactgtggccctggcctttccatcatggctgctaaacagagcccaggctagatcaacagtctctatctccaatgcattttcttttagggaagaaaggtacacatattctgaggggataagtgtgcagcctaagacaatcgcatcctccttcacctgcacggtgttattcttcctgtcttcggtgaagtgttgctcaggcgttgagcttacaaggaatgtcctacacataatcacctacaaaattcatgctccaggatcatacaactgggggggttttatatagtaaaaacacaatgtttaagtaagttctcacatttgtgttgggccacattcataactgcctttggtcacatgtggcctgcagtctgcaggctggacacgcatgggacacacgcgggagtctagagcaccattggcacagcgtttgctttctgagaactttgactctaaggactcaggctggttccacatgagccttgccacatttgcctccgagtgaccctggacagacccttttcctccttgctcttttatctgcagtatgtcacaagcacaatccatatgccagcctaaagtcctcagatctgtcatatcctttcctgccttgtaaagattacgctttatcagagagctcagcagacgcattagcactctggtggtcgacctatttgaatacgtggtttctagttggtggaactgtttgggaaggattaggggtgtggctttattagagaaggaatgtcagtaggagtggcctttgagctttcttctctctctctctctctctctctctctctctctctctctaattagatattttctttatttccatttcaaattttatcccctttcctcatttcacttccgaaaaccccccatcccatcccccctccccctgctcactaacccacctactcctgcttccttgtcctggcattcccctacactggggcatagagccttcacaagaccaagggcctctcctctcattcatgtcccacaggaccatcctctgctacatatgcagctggagccttgaatccctccatgtgtatactttggttggtgatttagttcctgggagctctgggggtactggttggttcatattgttgttcctcctatggcactgtaaaccccttcagctccttgggtcccttctctagcttctccattggggaccctgtgctcagtccaatggatggctgtgagcatccacttctgtatttgtcaggcactggcagagcctctcaggagacagctatatcaggtgcttgtcagcaagctcttcttggcatccacaatagtgtctgggtttggtaactgtatatgagatggatccctaggtgggacagtctctggatggcctttccttcagtttctgctccaaactttgtctctgtatctcctcccatgggtattttgatcccccttctaagaaggaccaaagtattcacactgtggtcttccttcttgagcttcatgtggtctgtgaattttatcttaggtattccaaacttctgggctaatatccacttatcagtgagtacataccatgtgtgttcttttgtgattgggttacctcactcaagatgatattttctagttccatccacttgcctaagaacttaatagctgagtagtattccattgtgtaaatgtaccacattttctgtacccattcctctgttgaaagatatctgggtgctttccagcttctggctattataaataaggctgctatgaacatagtggagcatgtgtccttattacatgttggagcatcttctgggtatatgcccaggagtagtatatctgggtcctcagtactgaatggctgagaagcacctaaagaaatgttcaacatccttagtcatcagggaaatgcaaaacaaccctgagattccacctcacaccagtcaaaatggctaagatcaaaaactcagttgacagaggatgctgtcgaggatgtagagaaagaggaacactactccattgctggtgggattgcaagctggtacaaccactctgaaaatcagtctggcggttcctcagaaaattagacataacctttgagctttcaaaagccattcctcattaggtctctctgcccagtgcttgtggatcagatgtgagctctcagctgctattccagcgccatgcctgtctgtctgctgctatgttccctcccattaagtgttctcttccataaattggcttcatcatagtgtttttgctttggcaatagaaaaataactaagacaagctcgtcctgaggctcttgctaaatctacctgtctcttaattcctgtgagcacatacctgtcagccctagtaatctgggcatcaaatagatcgcctttcacactcagtcacctcacaaatgcccgctattcttttattccatttccagtccatgacatgcacagtgactggcaataaccaagtgttcttaatggcttatatgaaccggtccatcaggggctgatttcacttgtattgctgcagactgtgttgccttagggagtgggggatgggaggagtagctttattagtttctctgcctccacagcactcagactgatatcatctgccctctcgtcccagcgctgcacaagccaggccatgagggagcttcttttatcccttgtttaaaagctttccctgattcaagtcattcagatgtggggtagcccttgattaccacagtttccggtgcttggccatttattagggcccgctctgcatgccaagtcaaggtttttctcttcctccgtattaaaggttgaacctcagagatattttatattaccccctctctgccccaccccattatctgaatcctctcactggtttcaagatctcaggaagagctctttaatacacatctgatgtgttctctctttcctttgcatcctgccaactgtatcaaagaacaacatggaccctccatccatctcatccttgccgttcccaccttccctgccaaatcagaggctaacgcagaggatcacatctgcacatcatttgtgctgtgatatagctgaattctttatgggcagacggctgagcctcgaccgtgtgcctttgtgcacataccagaagctttcccacagttagttgccatagcctgcttagtgatcctgtcctgtgtgcacttttttaagggattgcaaattagtatctagaccattaacctttgagagtgtctcattcatgaggcagaccttagtcctcagtgaggcctgccacccattctacatataggaagatgagcaccccagacgctgtaccccaggatgtgccactctcacatggcttagcctctgtgacctgctttacagtccgccacaactgcaagaacctcaccatcccataccacgtggagatgcccattctagtttgcttcactgttgctgtgatgaaacactctggctaaaagcaactcaggagaggaaacagcttacgtgccttacacttctcacaatccagtttggagggaggtcaaggcaggaacccaagcaggaacagaagcagaacctacggtggcatgatgattcctgactgactcactgccttcctctcagtttattttctcttgccatccaggccccacctccttgggaatgataccgcccacagtgggctaggccatcatatctcaattagcagtcaagacagtgccccagagacactaccaccgagcagtctgatgaggccaatctcgttccccattgaaggatcatacaactgctcgtcctcaccctatctttggttctgctggtctctgttcaggtaccaattatgttgtgtgacttttcctggggcgacatgaacaagtatctactcatcctagagggggactgaacatagaccaaattattccacccggtctagcttaatgacccagtgagggttttggtattttgaaggtcaaggcgaggggttacgaacaagaatattggggacttaaaggcaattttatcattgacaatccctccccatgtgagcaacaactcgggaaagctgcatccacagaactccctgaaagagctgtgcttagctcaccaatggagtgttccctctgcccccagcaattgtttactgcttttatgaccttgcaaaggggccgtgggactctcgggactctctttgtacgttccattagcttcttgaggcttttaagttttattaacttcctgaatcttactgggccgtcctcttctctccagaaggaaacatttcaaatcagagaaggtagataaacaacaagcccaagttcaataggagcgagggacttcgtgctgcttagcttttgtcagttttgtgtgcacttggaaggaagacatattagttaagaagaaacctccatcaaagtggctcccaggcaagtctttggggcatttttttgattaatgtccagctttctgtgtggagtctcattccggggcaggtggtcctgagttgtgttaagtcaggctgtgaacatcatggaaagcaagtcagtaggcatcattcctccgcgtcttcgactttggctcctgccttgcattcctgccctcaattccgtcagggatgagttgctacctccaagtgtcagatgcaataaacccttttcacccccagatcatagttttggtcatagtgtttattataacaattgaaatcaaacttggaaagacttcaatatctcaacaccatccaggcaaaacatcaattaacaaacatgggtgttgggctagagagatgatggctcggtggtgaagaacacttgttccaaatcatgaggactggagggactggagttaagaacccagcacctatgtgacaagtcgactgtccccacagatgtctctaaccctagttctggggggggggnnnnnnnnnnnnnnnnnnnnagtcagcagttagcagctcatgttcttcttgcacaagaacctgagtttggtttccagcaatcacatcaggcagcttacaattggaactctggaggatctgacaacctgttctggttattgcatacatacatacacacacacacacacacacacacacatacacacacacacacacatacacacacacacacacacacatacacacacacacacacatacacacacacacacatacacacacacacacacacacatacacacacacacatacacacacacacatacacacacacacacatacacacacacacacacacacacatacacacacacacatacacacacacacacatacacacacacacacatacacacacacacacatacacacacacacacacacacacacacacaagaacaatttccttgataagcgcagaggtgatgatttttaataaacttcctgcaagctgaatctaccagcccattacaaagatcatacaccacgtgctcaccttggtttcactccagagatccaaggatgatcaagattcaccaatcagcaaacctaacgtggcactcaaacagcatcaaagacaaagatcacatgactgtaggaggctcatacatcaacacaggaaaagctgtatgcaacgaacccacagctaacatcagactaaattggggaaaaactgaaacaatttctctgaaaatcagaagtgggacaaagattattgcctttcatggtagctgtttggattagagcggtacggtaagagagatgcatgagagggttataaaggtcaaccctagactcctctggacctgtgaaaacaaacaaacaaagacaactctgaaaggatcaaagacctcaatgaaagacgtgaaactaacggacaggaaaacatagaggaaacccttcaggacttgggcagaaataacgacttcctgaatacaacccccatcgctcaagaaacaatagcgacggctgtcaagccggatgtcatcagccacgtccttgcttgttgcagaactgttcacaaggtcacctaatgaaatcagccgatgtattcatccatggatgagtgtgtgtgtgtgtgtgtgtgtgtgtgtgtgtgtgtgtgtgtaaatgtatactattcattcataaaaatggaaaaataatgttaatgcaggaaatgttttgctgtgaaaattgattatcagttcatttggaaatgcaaaagacctcaaagagctctggccatcttagaaaagaagagcaaaataaaggcccacattaccagacactgtgagctaataaagacatgataattgagatagttcaatattggtttaagcaaaaattaacagaccagagacgagaacagaggccaaaagcagacctaggcttgtgccactgcagttcggtcagggaaagatgttctcagtaaatgttgcttagatttgttgaatatccatacagggaagaaacgaaccttcactcttgtatcacagacaaaagttaaactgaaattgtctataaacctaaacacaaaagatgagcagaaacaaccagggtcccaaattgtgcagaggggaaaaaaaagaccttcagtttgagatgagcaaggccttacaacccagagtgctactgtggtagtcatctctcagggttcctcctcctccccctccttcccattgccctcctcctccccttcctcgactgtcatgatgagagcatctctgctgtctctacactgctcactatgatgggctaaaacctctgaaatcataaagccataataagccctaatagttaacctcttcattgcttatttttttgtgcatgcacacatgctgtgctgtgaatgtggaagtcaacggacgattttgtgggggtcagttcactcctgtctttacatcaacaggagaaccctcatcaacccagtgacagggactttagttttcagtccctgggaattgtacattaaactgatgtgtggaaggaaaaatctgaatgcttacaagggcctgtcagtgttgggaggatgtggaacaattgaaattcttgagctgtagaaatatacaatccagttatctaactttgagatcattactcctaattgtcaacttgactagatgtggagttgggagaaagatatgtcctctgagtagatctgtgggggcctttccagaaaggattagccaagagagttgaggcctcctcagccagggtgggtgtcagtgtccagccatggagtagctgtaacaagagctaaggaggaagcaggcttgctttgccagcctgctttcactccttgctggtaccctcatctgctctgctgcgtctgctgctgctgcgtctgctgctgccatacttcactgacatcagaacccatctcttctgcttccaacatggagtgaagaccactgggacattccagaccaccactgccagcttggggcagggggcatgaagcctcatgagtgggttcccagcatctccagtgtgaagacaaccattgttggaactctcaagcccccattgtgtaagccagtctaataaagtctctttcatatgacatattcatttggccaattctgttcagagagaatactgactaatacaaacttccagatattttcccaagggaagtggggagaaaaaaaaagctcatagaaagatgttacagatatagaagttttaatttaaatttgtctcaaatggaaataacccaaaagctaatcagttaatgaatacataaaatataaattccatacaatgggtttctactcagcaataaaaatgaatgaacacacagcaacattgatgaacctcaaaattattatataaagagaattacactttagaaagtcattctggagacggggaattgactcagtaagcacagcatttcctgcccaagtgtgatggttgagtttgaatccccagaacccacacagagctgggtgcgacagtgactgtgtctgtaatcccaaccctctgcttgagatgggatatgaggacagcatcccgtgtggaagcttttgagccagttagcctgacatatccagctatgaataacaaagaggctgtctcaaggcagaagccaaggaccaacacccaagatgtcctctgaactccgcacatgtgctgtggcatgtgtataatcacacgcatgggcataaatgcacacatacacacaccacacaaatcca

SEQ ID NO: 2393 - DNA, 2775 bp, Mus musculus
gcggccgcgccttccgcggctattggattagtggccttcagggatgagctcagccggatcggctttcagctgcagcctccgggccggccgggaaggcggggagcgagcggccgtggaggaggagggggaggcggcggctgcagcatccagagctggccctggcggtcggcgcgcccggcgcacaaaggcgctcagcccctggggaaggcaatgagcgcacagctgcccgggccctggccaccactgcagccctcgcggcgtgtgctcagtgctctagggaagaaacccggtgctccggggacgggcggccgaggtgcggcccgtgtgccctgagcgcgggactcgtcgctctccaggtcaggcgccaagctttagggccatcagggcaagggcttccgcatctcgctgagatcagcgcagtggggcacttcactactcgggaccggacctcggcggcctctcccgagcgtcaacttctccaagaacgtccctaactccagggcaccctgcggagcgagagggcgctgccgccggatacaagtcgagaggacgcgccgctggttgagaagcagcagccagcatccgcggggtcgctcgggcgcccctgcgtgggcggcagtggcagcagacctctctcccgggagtcccggacctgccagcgctggggattcctcccaggcaggcgctcgccctctcttttatggagcttgggtccctgccacagcccagcagaggctgtggaggtcatccatcaagaagcctggttcccagcctcagggtccatccttggataccaggattggaggcatctgcgaggtagcagtggccagcagtggtcccttccccatagtgaaccatgggtcagaagctctctgggagcctcaagtctgtggaggtgcgagagccagcgcttcggccagctaagcgggagctccgcggcttagaacctgggcgaccggcacgtctagaccagctgctggacatgcctgcggcagggttggcagtacagctgagacacgcgtggaaccccgaggaccgctccctcaatgtctttgtcaaggatgacgaccgcctcaccttccaccggcacccagtagcccagagcacagatggcatccgtggcaaggtgggccatgcccggggtctgcacgcatggcagatccattggcccgctaggcagcggggcacccacgctgtggtgggcgtggccacggcccgagcccctttgcactctgtgggttacaccgcactggtgggcagtgactccgagtcgtggggctgggacctgggtcgcagccgcctctaccacgacggcaagaaccggcctggggtggcatacccagccttcctggggccagatgaagcctttgctctgccagattccttattggtcgtactggacatggacgagggcacgctcagcttcatcgtggatggccagtacctgggcgtggccttccgtggcctcaagggcaagaaactatacccggtggtgagtgctgtgtggggtcactgcgaagtcaccatgcgctacatcaacggccttgaccctgagcctctgccgctgatggacctgtgccggcgatccatccgctcagccctgggccgacagcgcctgcgtgacatcggctccctgcccctgcctcagtctctgaaaaactacctgcagtaccagtgagcggcgctgaggatcagctgtcatctgtggtcacacagctccagagcgtcaggacacatcagtgacttggaaaaggaatgcctgttgccattgctgccaccgaccaggaccaggaggccacctcgtgaaccagagtgtagagaccattatcttcctcaagagaatgaataaaacattgggcaggagacggcatccagttagttccccactgcagacagacccaggaaaattggccagtggagagaaaatgggttctgaataatgaatgacagaagccagcccttgatggtctcctccacgcctgcccctggccagggcagagagactgtcctccattttaagacttggtaccactttgagagatgagtccagggtcccacagcagggcaaaagcacctggccttacctctctgagccggtttcctcatcccctcctgccctcttccgtcatggataaagttctttggccattcccctccccactttattcagggacatgaatctgatgacttgccctggggacagagtttcttcttgggtatgatcattgtaagtagtgtttgcatttttttttttttttgaaagaggagtgtggtgaaggtggctttctcccaaaggtgctaaggaagatggggccctcgtgacaccaagtctgagacaccctgagtatccagggctctggcagccatcattcagggtgaagcctggctgtcacaaagctttctttgagcaaattattttttcactgtaggagacttccagtttgtttctcgtttccaatatgtgtgtgatgcaccgtttatttatcagctggggccccgcggtgtggccttgggactgcaaaggtgggtataacagtctctgcaggacctgagacctatcctctcacagaatgttgctgctgctgctgctgctgccgccagcgccaccatttggcatcttttgtgtgttccaagataccctccacccagactcagttttaactggaaatcatcacagagtaggatacagagccagacagtgcagcctacactgtaatgtgaatgtgacctacaagcaaggaacatttctaataaaagtttgtcattctgtccttc

SEQ ID NO: 2394 - protein, 271 aa, Mus musculus
MGQKLSGSLKSVEVREPALRPAKRELRGLEPGRPARLDQLLDMPAAGLAVQLRHAWNPEDRSLNVFVKDDDRLTFHRHPVAQSTDGIRGKVGHRLHAWQIHWPARQRGTHAVVGVATARAPLHSVGYTALVGSDSESWGWDLGRSRLYHDGKNRPGVAYPAFLGPDEAFALPDSLLVVLDMDEGTLSFIVDGQYLGVAFRGLKGKKLYPVVSAVWGHCEVTMRYINGLDPEPLPLMDLCRRSIRSALGRQRLRDIGSLPLPQSLKNYLQYQ

SEQ ID NO: 2395 - DNA, 117548 bp, Homo sapiens
attaatagcagattcgacattgcggaaaggagtggtgaacttgaagacgtaaaaatagaagctactgaaaattaagcacacagagaaaaaggatgaaaaaatgtttagaataacaggacaactttaggcagcctatgtatgtgtaatggagtctttgaagaaaatgaagggggaagaaaaatatttgaaaaaataatcgctaaaaattttcccaatgtgataaaaactgtaaaccaacagatccaaaagctaaacgaaacccaagtacaagaaacataaggaagactacaaggagacacatcgtaattccctttactaaaaccactgatgaagaaaaaatgttaaaagtagcctggaggaagggaagacatattacaaaaaaacaaagatgagaatggccttcgattgttcgtcagaaacaatgtaagctaaaggacaacgaagcaacatctttaaagtgctgaaagaagaaagaaaattaatcagtccaaaattctttactaagggaaaatatcactcaaaaatcaaggcaaaataagacctttccatacatgcaaaagctgaaagaatttattacaatcagacctgcacaataagaaatgctaaaaggaaatcctctaggcagaaggcaaattataccagatggcaatatgaatctatacactggaatgaaaagtatttgaaatggcaactatgtgggtaaacacaacaactttaaaatatttaaatctctttaaaagataacaatttggggcaaaaataacagtatattaaggggtttataacatatgtaggagtaaaatgtatgacaactatacataaaagtcaagggtaaaaatggaaataaaatttttgtaaagttcttatactatacatgaaatggtatattacttgaaggtagacaatgacaagttaatatgtatcctgttaatataacctctaaagcaaccaccaaaataacacagtaacttatagccatgaaccaacaaaggaaataaaatggatttataaaaaataatcgaaaagaaggcagaaaaaaagagaggaaaaagcagcaaagaacaaatggagaaaatacaaaacaaatagcaagatgttagatttaaacccaaccatatcaataatcacattaaatataatagtctaaatatcgcaatcaaaaggcagagatcacccaatcagataacaaaatcaaatcacaactatatgctgtctataagaaaaccttttgaaatataatgacacatatgtgttaaaagcaaaaagatgggaaaagatatatcatgttaatgctaatttttaagagtctagcatagttatattaatatcaaacagggtagatttcaaagtggtattagcaagcttaaacagggtcatttcataaagggacataacaaaccaaaaatgtatgcatgtaaaacaaagcttcaaatacctgaaacaaaaaatggatagaactacaaggagtagcagacaatccataagtacattcatatatttcaatatccttctctcagtaatggacagaacaggtagacagaaagtcagtaaggatatagaagacttgaataacacaaccaacatgacttcattgccatttccaaagcactcctcccaccaatggcagaatacacattcattccagtgcacctgaaacatttataaagatcatctgtattttgagctgaaaatacatttaaataaatttaaagctattcaaatgatacaaagagggtgctcggatcacaatagaaccaaattagcaatcaattccagaatgctgtctaaaaatatccaaatgtttgcaaaaaataacacaattctaagtaacttatgagtcaaagaagatttttttaaaattacatagtattctgaatttgaagaaaatacaaacacaatatagcaaaatatgtgagaggtatctgaaacagtacttagaaggaaatgtatagccctaaatgcctatactagacaagaaaaatggtcttaaataaatgatctcagttttcacctgaagaagatagaaaaagaagagcagatggatcccatcataggcagcataaaggaaatactaaagatcagagtgaaaaaaatcaataaaatagaaaccagaaaaatacagagcaaataaataataccaaaagctgtttctttgagaagatcggtaagttgctaatgagactgaacaggcaaaaaagagtgagaatgagagctgggtgtttggggcagatccagagagagacacaaattaacaatatcagaaatgacagaggtgacatcattatagattctgcaggtatttaaaagattataaagaaatagtatggacaacttaatgtcaatatatcctacaattagatgaaatggacagatttcttgaaaggtgttaaatactacaatttcctaaaaaggagattaccagaagagctctgtatctattaaagaaattgaatttccacttaaaaacctctccacaaagaaaactccaaggccatattacctcactggtaaatttattctatgacacacttaaggagtaaataactccaattctatacaaattgtttcagaaaatagaagaaaaaccaacgcaccttaactaattccttaaggtcagtattagttcgatgccacagccagacaaagatgtcacaagaaaagtcaaatacagaccaatatcccttatgaacatggattcaaattgaatccaacaatatattgaaaagacaaatatattatgactaagtgagatttagctcaggaatgcaaagctagtttcacattcaaaattcaattaatgcaattttctatatgaacagactcaaatcgaaaggaaattgggaaactcacagcgtggactgggaaggatggaaagccagatctagaaaaaaaaaaaaaaaaaaaacagacaagaacaacaacaacaacaacaaattcaaggcagcagaaccatggaggaaatcttgcctcaaacccaatctcatgaggaccactactgccactcccagcactgatcactggatatagaggtgaccaccaaagctaacattgcccatggggtcttctgccaaccctgcctccaacagaataaattctccatccttgcttttttgaatggctggtcccagcttcaaaaacctaagagggaagttttgattggccaaaatgtcaggaaggctggaatagtaaggaaccaacaaggggtctttgttgctaacaatataattcactttaactagtacattcagatagagacttagtttaaaagattgactagctcacggaatcattgtgattgtcaagacgtaggttctgaactgagttttcaggaatatacctgtcattatgctgcagaactgacgcggtaagggagcttctgccatagccaagagtaggaacctgctactcctaccactgaccccaaacaagagttgcttcttcctcacaccagccagaatggatgctctaggcctagagagtttcttcaagtagttcgcttctgagtcagatcagtgtgtccgtttgcagaatccagatgacatctgcatcggttactggaaaggagtcctgatccagactccaaaagagggttcttggatcttgggcaagaaagaatttggggcaagtccataaagtatagtgaaatcaagtttattagagaagtaaagaaacaaaagaatgactacttcataggcagagcagccctgagggctgctggttgactatttttatggctatttcttgatcatatgctaaacaaggagtggattattcatgagttttttgggaaaggggtggggatttcctggaactgtgggttcctctccttcttagaccatatagggtaacttctggacattgtcatggcatttgtaaactgtcgtagcacttatgggagtgacttttagcatgctaatgcattataatcagtgtataatgagcagcgaggatgaccagaggtcactttcatcaccatcttagatttggtgggttttggccagcttctttactgcatcctgttttatcaactgggtctttgtgacatgtatcttgtgtcaacctcctatctcatcctgtgtctaaaaatgcctaacctcctggaaatgcagccccacagatctcattctcattttacccagcccctatctaagatggagttgctctggttcaaatgcccctgacacatccagtggcaagggaggctaggaaatgaaagagttttgtttatctgaatttaccaaaaacaaattgtgaagagggttttcaaaagattttgagcatcatgtcatgactgaatgctgggctttttggccattactgcgaagtgactctgcttcctacctagagtaatacggtggggaattccccagcttaggcaggggaattcagctgctcaaggtccaaaagtaacaaatgccaatagaggaaagtactcttattagttccattttacaaattggaaactgaaatttcctagacatttagtaacttgtgtaagaccacagcccaaagaacaaacatttgccaagccctcatatacataacctcctttcatctttacaattttatgtggtaaatgttattgcccccatttcatataagagaaaaatgaggattatagaaatcaattaaaagctaaagattctgtggtacgtgcaaccctgccatgatctgccatgcccatctcgaagcttcctcccagggtaccaagtcattttatagcagaactctccaggcctccgtgcgtgtgtgtgtatgtccttaatatcttgtcctacacaaaattcgatgaccactggatatatttggatatctgtcactgagcctcacctgtcttctttcctactgcagactaactcaggacttttccagagtcctcctgggaggctgagacttctgggccccactaggtctaattatctaagaagtaaaggggaatggggcagggaatggaatggcctggaatctgaagccctgtcagtatgcaaatcacttacttgcatgcaaatcattccaaggaaatggagctgggtatcccttggtcaaacatttttgtctcctgtgaatgatgcaaattacttttggtacctacagccctccctgttttgtggctagattgaaaaatttttagccctgcatttgaataggctgacccatgctagacagtgatgaagaggacaagacacaatgattccactcctatgaaaagacccaagaaaacattagcacagatccaccagggaacctgttcagaaatgttcatagcagcactgtttatagtagctccaaaataaaaccaatctgaacacctatggaaggagaatggaaaaattaattgtgtatgttcacccaatgaactattatagagccatgaaaatgaatgagatactgttacatgcatcaacatggatgaatcttgttaagtccaatggcaattcctagaaaatgatatatagtatagtaccttttaataaagttcaaaaagcaagtaaagctaaataaattcatgttacatgtatttttaaatccaaggaaatgataaaccataaaaatcaggatagtggccaggcgcagtggctcacgcctgtaatcccagcactttgggaggctgagatgggtggatcacgaggtcaggagttcaagaccagcctagccaaaatggtgaaactccatctctactaaaaacacaaaaaattagccaggcatggtggcaggagcctgtaattccagctactcgggagactgaggcagagaattgcttgaacctgggaggtggaggttgcagtgagctgagatggtgccactgcactccagcctgggtgacagagcaagactccatctaaaaaaaaaaatcaggatagtgtttttgtgtgaaggagaggcaaaaagatgggctaggaaaggagcacccgggaagatgtaggtgttggaaatgttctaggtcttgggttcaatagtgggttcatgtgtgttcatcatgttatgaataaatacatgaattaataagtcccatacttgggctaatgttgacaatgtgtcatgatcaaggattatgattaattcaattctgatcattcaatacctaaatggaagacagaaatagagagggagagagagaagccaatggagctggcctttcttccttttttcctccctcccttcctccctgcctgcctgtctttcttttcttttcctttacctttaattattccacaaacatctactgtttgtcgactgtataccatgccccaggctgagaactaggaacactgggatgaatcagacacagtcctgccctaaagagtcaccatgtgatgcaagagtctgacaattccccaaatgttttcaaggtgctatgacagatgtaaagcaacaaggtgtggtagggcttacagaaggggcccttaatccagcctgggctatttgggaagactgtggagctttctgctttgagaaattagcaagaagaaaatgtggttgggggtgtaacagctataaaaatgaaaaagacagccttgcccttgaagtgctcatatcttggggtgagggacaagaaaggaggtcacaacagtgggacttggggttgtgagagaggcaagcacaggcttgagatgcacataggagggcaccgtgctgtgcctgcagtgttgggaaggcttcctggaggagatgacatgtatacaagcagagagacgaagtatgaattagagttacctggaaagtctgtaccaggaagaaaggtaagcacctacaatggcctgtggcagggagaaagagcatggaggagctcagggggccccagtgtggcctggcccagagcgcaaatgagaggaggtgaaactagatgagtaggcagggagccagattccatgaaaaagcatgaaaattatgctgtgggccatggggtacctctgaagggagtggcaagggtgatttttccttcatgaagagagcccagcagtagaggtgagggggccgctataactgctagggaaagagatggtgatgcttgggctgtaaagaggaacagaatttgagagctgagcacctgatggacaatgctgcatggcaggctgggctcaaacagggttgctcctgaggggtgggcagaggacattcagacctcacacaacacagttctgtcttgccacagacctccttggagcaagctgcaagctccaaaatttctcagaactgaaagtttttcctccaacttctgtaaaaccatggttaatacttttacaagacagagaaggagtccgagatttcaatagctaaaaactgggaagtagaccgaataccattccttgtgggagcaaaggcaggaggagtgaggttcagagctttgctttatccaaggggttctggacccctgactgcagcagctccctactggaccttctgccccaggcattactttgccttagtccaagaatcccacgaatgctacagatcttggtctactcctgagaagtagaaggaaaaagatttattgtgcaccgactacacgacaagctacaacccacaactgtactctagggacattcttctgttcctgtttagaaatgagaaagctaggacccaaaggcttggaattgagatttaagcccagagctgtctgactatgcccatgcaatactgtacattctttagagcaatactgtggctagtttttcacggttgcatttttagactcactcttggacagttaagaacatcttgcattagttacctactgctgaataacaaattactccaacatttagctgattaaaacaacaaacatttattatcttacagtttccatgcatcagaaatctaagcacaggtagttggtttcggtgattcacgatctctcatgaggttgcagtcaaggcatcacacagggctgtattgtcctatgaagggctcagctcggcggggcagagatctgctcccaagttcactcatgtggttatcggtaggtctcagtcactcaccatatgggcctctctccacagtgccactgcaggatatagcagctggcttctccagagaggtgatcccaaaagagagcaagagtgtatgctcaaaacagaagccacagtcttcttataacctaatattggaaggaacatcccattacctctgctgtattctgttagtgagaagcaagtcagtaagtctagcccacactttaagggaaagggtttacacaagggagtatataccaggagtcagggatcactgggggccatttagaagctgctgatctcaatctaaagaattttagtagccaggctatcctggcttctccccaaatggcaagttgtttcccttgttatccagaggctggaggatttgggggtctacagggacacaagggggccctgttttggcccactcctttgtgcctggggcataatctcattgggaaaggccagtgtggtgaacctaactggagcccccaagggagggggggagttgttttctcaaattgtggccactgctccctccctcccttatccttgaagctactgtgatgcttcccagcaccgagtggaagcaacgggcatcctccacacacacacccagcctgtcagccagatgggtagagaaaccatcagcatgaacgtctgctttaaactttcctttgcttctgagcttctttccacaaattttcttttcttgctccccaaccacatccataacccccacagtagctcacagtagaggtgctccaggagcttgtcaataggaggtaggaaggaaagacaccaagtgtgaatgtaggtcagcactgccacttagggcagttcaaatcacattcactgtcctcagcatctatcctatgctggtgcagggcatccagagatgtgtgaggtacctatacttgccctccagggggggctcacagttttaggaggggcagacatgcaaacagacagtgatgaaacgttagaataagtacaataaatacgtgtcaatacacacttttgtcacctcatcatggttatcttggttcataaagcatcatcttatgcttagactattacagtagctgccaacctggtttcctccatccatccatccagttggctgctaagaggtctttctggaatgcaaatccgacaaggtcactaccctggttaaaggcctcccaaagtgatggggaaggtcaagctcttgatacagtctccacccaagaccctagacaccgtccatccctccagttccgtcataccccctctgctcatagcacaggctctgtgctgtgataggtagctctccaggtgaccatgttgtacccctgcctccaggagctaattcatgtagacacatttactaggaaacattcccagttgccctttccagtctgacaaattcgccccagaacctctctcaaaacgtttccttcatagagttggattgtctttacttgttttccatgtccttgatgaaatgcgcactctgcatctagactctgtctgcatctagactctgtctgcatctagactctgcctggtacctggcacagagagggattgggttagcaaatgactgcgtaatggacctaaagtcaattctgggagcacagacgagggccaccaaaccaagaactttcaatttccccaaggaagcgcagataccagaagcaccctcgaggcttctgttttggccacgccctttaccccatcgctcagttcaggctcccaatgaggcggcccaccatcagcgctggtagagcaaagagaccgacttcctgcgcctcgggtgggcggggaacgctccttgagcaggtgcggtatgaaattggactttaagagatgagttggagcctgatctcaaaaataaagtgtggacgtgtgtgtctgaggaagggggataataaaccacccttttttcctcctggctgctatttcccacgtgcgttgagtaaaggcaccaaagctgcctagtgactgggtgtctcctccccgtcaggggcacccaccctggcgctccaggcgcgcttgaatgaatccgggaggacccgcgcgcaggaatgaatgcgagagctagggagtgagcgggcgagtgggcgggtgagtgaatggcgaccgcgccgccgccttggcacaggggcgcgggcgcgggctccacttccctctcccgccagctggtggcctcgagaaggtggcggcgccggcagcggcccgagctgggacggccggggcgcgggatggtgggggaaggggcgttcccggcgaccgcgccttccgcggctattggattagtggccttcagggatgagctcagccagatcggctttcagctgcagcctccgggccggccgggaaggcggggagcgggcggcggcggcggaggagggggaggcggcggcggctgcagcatccagagctggccgtggcggccggcgcgccccgcgcacaaaagcacccagccccaggggagggcgatgaacacaccacatcccgggcccgggccccagctgctgctaccgctgcgtgcgctcagggcgctggggaagacgcccggcgcgccgggggccagcggccgaggcgcggcccgtgcgccctgagcgcgggactcgtcgccctccgggtcaggcgccaagcttccaagcggctagagcgcgggccttggagcgcccccaggatcgcttcagtaaggcgcttccccactccaggcccgacccccggcgcctgagcgccaacttcgccaagaacgctcctaactccaggccatcctgcagcgcagagggggcgctgctgccgggcatcagccgtgaggacgcgcccctggccgtgcggagagagccggcatttgcgggtcactcgggcgcccctgagtgggcggcggcggcagcagacccctctccagggagtccaggacctgccagcgctggggattcttcccgaacaggcgcttgccctctcttttatggtaagtactctccagctcctggtgaggggcgcgcgggggccgggagccgagatccggctgcacggactttgtgcgggccagcactcgacacagctggcgctcctgacgtcccagtccctgagaattcctctctgcaggttgtggcagttcgagatggttgatttgcgcgcagccctggggcgtttggggcccggcctttggtatcatgggttctaagccctttgcttctctgcgtagcggacaacgcacaaaaaactgccatccgattcacccgctttggtttggatccaggatccgtcactcactggctgagtgaccttggacagggcgccaaacctgtttcctcatccgtaggatgggaatgataattgtgcacattttataggggtattggaaagatctatgggatggtgttcgtaggtagacatgtgctgggcacacaggaaacactcaatcatatgttagctagtattattattagctttgcgagcccaagcttgttatccaactttccgaagctgcagcagttccgtcgtccgtgtaatggggacaataattcctgggggtctgttcgtccggggtatacggagaggtggaagtaaagcacgggtcacgcaataggcaccggtggctgttgttaccgtttattcctgactctggggcagtgaggctggtcgcctggcccgagagcgactcagggaccagtcctggccttgcttgaatacaaacttgtctatgctcgggaagggagggggttgggagctcaggaaaccctaggcgcagggctctgggaaggagggagggggccagagacttgagcgcggcaaatgtgtccgccctggtcgctctgtacgcgccaggggctccaagccagaaggggacgccgagcccccgacctctgactggcgggagaaccgggggagtggctgctcccgccggcccatggccaagcgcagacggctgccggcaggaaggagaggagggcacttttctgtaccgctgtcgcgagaaggtggagagttctcagttctggagtcaggcttgggttcgaatctgtctccaccaccagctcgcggtgtgaccttgggcaagttctctaacctccccccgcttggtttcctcttctgcgccccactctcctccttggggggttgggggatgaagataggagttcctttctctcagactctgagccctctatcctcccaccccctttctggccccctgccccccacccgcgcaatttgatgagcttaagtctggaagacgtaaaatgtgtaaaagcatgatataaacatcctttacccaagggcatattcctctgagacacataccctctaatttattccatttttaaaaatggtaatgaaaagaatttaagccacctttggcaaatcacaaacaaaattcaacttactggaccttctacccaaatatctctccagtttgtatttctcgtttattttaaagatatatttaatgatataaaaataaaatctgcaaggaaaagaaatcaccagaaacagtcaaaagatatatgacaaactgtcacatatgacatataccactcctatcacaacaggctcatctctttaaatatgtaagagattcctgaggtcaacaaacaaaagatcaaatgggcaaagacacgattcatacatgcgaaataaaatagaaatgataccaaaacatatgacaagataccttacctcaatacgaaaaatgcaagttaaaattacaagatttttttttaatgtatcaaattagcaagtagtcataaccatttatcagaagcatcttttaaaaatgtagatcacatttctccctagctcaggacctccttaaggctgccacagagtaaaatctagatgatcccaggggtcctcaggtctggtactgcccttctccacctcttcctcaccattttcctctcccccactacccaccctcctagccttcttccttttactccaacactccaaaggctcattcacttgctgttcccctgcctagaatacttttcctcctagtttttcatacaactgaaacttcctcatcatttacgtagaactgtccttggaagggcttcatttctatcccagaaagtggccaagccacagtggccagtgcagaattccttgcccttttggggaaagacctagtacaactcaccatacaggagttacttaatttcccctgagctgcccgacctgttgtcacacatccatgctctagaaaggttttttctctgttgatacaggagtgaagggtctcgggcatgaaaatcaggggagtggcaggccgtagatggaggtccccagaagtctctgcctatatatgtactatataagtacatagtatgtactcttgatttatgtgaacatgaccatctgtggtaagaaaagatcaactataaaaaatttttaaaccagcaacacgtttttaataaaacatggttcctacataagccaactaatttatttgctgctgatcagttcaagaaatagggatttgttttgaggctataggaaaaacagttgtgggtggtgtgccctttgggaaagaggtggtatacctcaaaccagttatcatgaactttgtgtggaactttagaagaactttcctaagcagtgttgattgcatgtgatttttgcttcacacattgagttcagaacttactccatttaaaatgtatacgtgtggtggttcatgcccgtaatcccagcactttgggaggccgaggcggggggatcgcaaggtcaggagatcgagactatcctggctaacacagtgaaaccccgtctctactaaaaatacaaaaaattagcctggcgtggcggcttgcgcctgtagtcccagctgctggggaggctgaggcaggagaatggcatgaacctgggacgcagagcttgcagtgagccgagatggcaccactgcactccagcctgggcaacagagcgagactccgtctcaaaaaaaaaaaaaaatgcaaaccatgcaggaggtatagagtggctagtccttcttcagtctgacaagcacgtcttaatgcagccagaggtaacaggtacaaggctgtgtacgagtattggagataaaggctggttgggcactggctccattaagaaatgcagatgtggtgcaagagatagcagcaggaatcaacagctaagatgaagacaaagtgggttggagggcagagggtgcagtgggacgtaggcaagaggacataatggggcggagggaagaggatgtagtgggctgaggggctgccacggaggggtgcccagttctgcttctgctagaaggggcaggggagtgagagaatgtcagccaggtcagagaagatgggaagagtcccaggatgtgctgacgaggagagtctggcatgactggtctgaggtgggccgtgatgacagacagtgtggaagaaataagagcagcctggagggcccctgggtgccaagcaaagaggtgcagcttctctctggagaagctgcctggagggttgaatgaagagattggtgggtgtcttggtccaacttacctgttggcagcatggagagtgggttggcgggcaaacagtggagtcagggaagcctgctaagagaccagtggagtaatccaggcaagttctgaactaggggaaagctgacggggttgagtggtggggaccaagagacgggatccatggcaggaacagtgacatgcagaggaacctggcatgtgagagagggaagaggccaggctcagcctaggacctgcagattccgaggtgcacatggaccacagatgtcccgcagggctgagagtgtgggtgtgcccatggtaggaggcttatgatggaaagaggtcagctggccttacaaggtcatttgaaacaacacccaggcagggctgaccaggggcttctagtaggtaggtcttgtgctgaggagagaaggcagcactggagacccggcttgagagtgtctgcacggggctggagatgcaggtcataagagaagatgcatggagtgagagagtgaaaagcggaaactgaagttgaagcaatggacttgggggtgccccattgatggggtaggcaggaagacattggagccaggaggaggcaggaaagctgctgtggtaagctctacacttcaatgtgctggtatgtgtggtgggagacgctggagcagtgccaaagtcatccatctgacctttaatgttgtgaaatgtcatgtatggtgaactggagctctgctttctccagaagtgagtgggccttggcccggtttactggccacagagacattctacctgttatctaccttcaggagacatctacctgttatctgcattctatgaaatgtgcaagttgtacagattcctggggctggagcagctccctccccgatcctgctccctttctcctctcttcctctcatcctctctcctttcctccttagtatctcaaaaatgcccccagagatactgtaggcttaacagagggatcttcagaaatcccagcaggtccctattatgacctggctcaagccagaggcatgaatagttctgcttttcttttaggcattctgtttccagacaaccagttataccaagtggagaaggttcatcttgggaggtaaatgagggattggacgcaaaccttatcatgttttcatcatcgttttccccagagggcttcattaaatggtacccttcccatcttctcccttcatgctttgacccagcccagacatgctgggcctcagggaatccagctgccctgcaaacaacctccacatgtgcctggggcaggcctctgggctcaggggcagctgtggtgaccgggctggcccggactgcacgtggccttgctgtctcagtggtatgtctctttcaaatgaccttgcagagcttgctgccctggtcacagcctagcaaacctccttcatcccatttgctgctctccttgctggctgacagcccagcttgcaccttgggggcccctggctcagtcacgcgtgggaggattcccatggaaaccccaggaggaggagaggctcagggaagcctcattgattctcgctccaggaaaacaggcgtgagatgattccacctggaactggacagatggctctctttgtgagctcttggggaagaaagggcttgcccagccagttgtagcctgagctccatgtgtgtatagcagggaaaagctaatgaatgcctatgaacaaaaccttgggggttctttagttcattcattgttggtgggttcattctgaatgagcatctttaataaaacagcctccctacttaatatttgcacaagaaaaatcttaaaaacattccagttaaactaaggtcaggcacctatcattggtacctttgcacagagtcaaaaattgaaaaataaagacatgaaataaatagtctgagctcacagtgctctgcattcccagttcattcttaagcgttggttctttctaaggcagtgtattgcttttcttcatttgttcgtgctcgtgcattccatagacgttcacccaccactttctctaagccaggtccatggggactctgatgagggagacccggcccctgctcccaagttgccccagtccgatgggagggaggcagccaaagagacatcatgtccccttgtgataagagctgtggtgggcacaagtacaagggctctgagagcacagggggctggggagctccccagaggcactaatatctaatatcctgaaagcctcagagaacctgtcgaggattttgagcaggagcgtgattagatcaactgtgtacttttacaagtgcagtagtatatatttgaaagtaatatgcagtctataaaggaattccagtggtatctaactggatttctttttacagtctttgtcattattcagatctctcgtggagtctgacccctttggtgtaggctgtctccctaagggaaagtggttgagtcttatgcttttcagcagcctgagatccccagggcaggcatcattactgctggctagatgaaagaaggagacttgcccccacctctggctccagcaagtccaaagccagaggccacacagagagaagggcatttcacgcagtcactaccaatccccacagcagtcatgtcttcttgcagaccccgtgcccattgagctcagctagacaggcctctgtggctgtgattttgggtcccaggcctctgaagactgtgcatcatatttttcaaactaatgaggttccttaaacagtgtggcattgccacttcatgtctcctcatttccctgtcgggtaggaacatctgctagggtcctgggaaaggcaattagcaaattagagtttttgttttcttgctcagccatgattgaagccccagagcagatccttctggataatgtcattaagcatccccatccaagcatgacgtaggaaattaagtttggttttggggaaaagtgacggaggcatcctttggcgttcttcaggatgctggctgcttactgggttgagagatgatggtattcctgtcaggaagatggatcctgttgtatgtcccatgtgcctggcccagtgctgcatgctgtagtggagatgaggagaggagaaatgtgctaagtgcccactccctctggctggagagagaaggcagggatgagcccgacttggccactgctgtgtcccttgctctcagctgcacagtgcctggcactgtgttcactaagcattttttgaacgaataaatgagggttggaagcagggaaggatgcaaagcagtagctaataaaggagtagactggatacagccaagagtcagctgctcaggagtgagagtccaactatgatagtggcattactgggcttcatgtccccatatcctgactttagccctggccctttctctgcttcatcctctgaaaaacagcagagcatgagccctccctgaagcccagcacaacctctccacagtccatatgtgtgttctgccccatgttcaaagtaccaggcttgtgtcttgcatggagggagtagtgcagtggctgggggcacagaagtgctggtgaaagtttcctgccatcagaggaatgccctcaaggtagaaaaaagcagatcagtaaggcctgaaagatgtccccctggctggctcaagggtggacagaggtacagggcaggccccaggaggcctactggatcagggcaggcttcctagaggaggtggagctcaccctcatggactaattatctctcaaaggctccacctccaaatactatcacactggggctttgtgttaggccatttttgcattgctataaagaaatacctaagactgagtaatttataatgaaaagaagtttagttggctcacggttctgcaggctttacaggaagcacggtgctggcatctgcttggcttctagagaggcctcaggaagcttacagtcatggcagaaggtgaaggaggagaaggcatgtcacatggtgaaaacaagagcaagaggcgggggtggggaggtgtcacacacttttaaatgagcagatatctctccagaactcagtcactatccctaagacagcaccaagccatgacagactcacccccatgacccagacagctcccaccaggcctcacctccagcactgaggattacaactcaacatgagatttgagcagggacaaatatccaacctatattaggcttcaacatgtgaatttggggaggacacaatcagttcatagccaggcacattcaagtggtgaaatggcaatgttggaacacatccacaatttaaaagagcactcaccacttactggaagccctgtgatgtgccagactttacaggtgtctgctctgatacttgcaaaagcaggtgaggttagcacatagttagcagcacttccaaccagtctcagagagattaagttctggcctagggtccaacagacaggtggggattcacatctaggtctcctgtccttcattagattgcccagctgctagtttcccttaacggcttatcattcatggacatgagcactctgctgtgcgccctgtactgggggagcagcaaaggggctgtctatttacttgcccaccttgtcacaccacagtgtgagcactcttcaggatctctgcctgcctctagtagggacagagactttgagactatgattgcaaaggagagcactgggccctcaatgacccagtatgggccaagccaagtactagtaagaggtcttccctggggctgctgtttggctgttgctttcaaacatgtttaagtgtcttttcagcaacagcaactccacagttggcatggttgtgtgcaaggataaagcagtttcccttagaaattttctgtgtgggccacacagagctggttacagtcattgctgtggagagggcattattctaaacaacatggaggaagaagtaagagcacaggcttgtcatatggtaactctggggttgatcccagtcctgccacttcctggctgtgtgaccccaggttatgcaagttatgcaacctctctgagcccgggctgctattgcaaagagtgctgcgtatgtatgcagtatgtatgcatgtgctgtgtacataggtagttttgtgcatttgagaacatatctgaataaatgctggaagtagaattgctaggtcaaagggtctgtatatttgcaattctgaaagatggtgttaatttgccatttgccgaggctaaaccagtttatatccactttagcaatgtatgagtctgtcttctgttccacacattctccaagcatgcgttatccatttttttgacctttaataagctgatagacaaaaatggcatttcaatggagttctaactcatttctttttcagtatacattgagtatcttttcaaaggaaccatttgtttttgtgtaaactgttgatatcttttcatattttgtacttgtattcatttgtaggagtttgacatatatttgttggtaatttgtgttgcaaattttttcttatgttaaaacaagtctaacttcttttacaagtgctttcagctacaccgttttgttatttcccattttcatttcttgttttacatatttctgtcttctcccccattaaatgattatatggtttatgttttatgtgtttttaaaaatttagttacttatgcatttaaagtatatttagtgatatgtgaaaatgcaaattacataatttttaggtgaaataatctaaataaaggcccattataccaatttttaaaaagaaaattcattataatttatagaccaaaaaaaaagagagaataaagcaaaattcctccaaaagctgacaatgtttatatctggttaatgagataggagaaagaggtgaattctagtttttgtcctttttttgtattctctaaaatttagacatttatttaaccttttctaattaatgagctttatttcttcagaatagttttagatttaaagaaaaactaaacagatagtacagagaggtcccatatgctcactccatttatcaccctagtttccccaattattagcatcttacattagtatggcacatttatcacaactaatgaaccagtattgatacattattattaacttattttaataattaatattaataattgttattaacatattttttcagatttcctttttttctcagatttcagtttttacctaatatcctttttcttctctttctttctttttctttccttttctttctttcttttttttttttttgagatggagtctccctctgtcacccaagctggagtgcagtggcacgatcttggcttactgcaacctccacctcctgggttaaagcagtcctcccacctcagcctccaaagtagctgggactacaggcgtgtgccgccacacctggctaattttatttttttagtagagacagcatttcaccatgttggccaggctagtcttgaactcttgacctcaaatgatccacctgccttggcctcccaaagttctgggattacaggtgtgagccaccaagcccagcccctaatatcctttttctgttccagatcccatccaggataccacattatgtggaattgttaggtctccttagggccctcttcactatgatggtttctcagactttggttccgatgaccttgccggttaggtcaggtattttgtgggatggcctccagatggaatttgtcctttgtttttctcatgattagagtgaggttatgggttttggggaagacacccaaaggaagatttcattatatcatatcaagggtacacactatcaacatgatagattaatataatagtaatataataatataacataatataatatgatacattacatgattagctttaatagtttatatgttttattgattttgttttgtttttgtggtagtttttcccaaagaaccatctctttagtttttgcttagttctattatttccctattttattatgctccattcattttttaaaatttaatagcataaatatatcagccatgatttcctctgagaactgctgtagaggcaccccgcaggttctagtatgtggaatgctttttgttattgttgtattccagatattctgcaatttctatatggatttcttttttgatctgagttggggtcaagttgtttaaagaattttttaaaatgcctaagtgataggattttgtgatctataattttgtgattaatttctagttttccttctgtgttatcagatactgtattatttttgctttttttgaagttttgtttgtgacctaatatacaggaaaatttttttgatcattccatgaacacttgaaaagaacatgcattctttgttttcaaggtatagaatttgatgaacacattagttagatctgtcttattaattatgtaatttggtttttctatgtctttacttaattttggtccactggtccatcatgagctagaagagggaaattaaaattacatgcctctgatgtgtgtctgtctaaggcccctccttatatttcctctagcttttgctctgaattttggtgctatttggtgagttcggtcttcaattgtggatcgcattctttattattattaagtattcttgtctcacttaaaaccttttgtcctgaaatcaactttacttgcctaatattaagattacagtgcctgcttagtttgagttcacacttccctgttatgtgtttgcccttcctttattttcaaaattgttaaatcactttgctttggggaatgtctcttatatgtagcatatggttgggggttttgtgtttttccccagtcttataatctttttttagcagtttactatggccatttaatgacatggtcaatatttcggtcttagttttactatcatatttcatgcttttatgcctttttgcctctcttgctttctaacaaaatctttcagtatatgatctgttttattttgtattatgttcaaggtttgtatctgcaagatgtgtatttttatttttagttctggaggttacctttataactagccaaaatggatttaatcttttgttgagaccatgctaggtgtctcccttctgaaataatcaatcacaaaattagtttacaaatttggttcccatttttatctgctttgtggcagcttttttcaggtgagtttgcttggtttgccatgttttgtcctgttcgtttattcctttctttcttctatagcatctttgactatatcctgtgctggttcctctttgaaagaggtaaaccttcttggatcagcattttgcaggagacacatgtggaggaggtaccaagaagagggcaggattgctccctggttcccaggaactttgttcacagggttgttgtagtgacttcctttagtctttgcttctactctgtcagcagagttctgcagctgtgggcttctcccaattcagagccctcctctcactctgccttgccaacacactgcttcctgtgaagatggcgggtctgtggtttcctctgttggccctgccctcctcttcccccagggtgtaggaggcagctcccactaccagaccacatgccctgttcccattttttctgataagggatcattagttttttccttcagggaatgccagctcctggctggctctgccagctttgtctgagatctgccaccacaggtgtcttctctaggtgttttctcacagtatttttgatcttcactgcttttggtagcccttacctgttttgggcagcctttccttataagctgtgtttcaggttataaatgtgttctagtttgctgaagaaggagtttgcatttctttttttctcctggattttgggtgatttcggatatgaaaaggagtaactttattctgctatcttaaaactgcctagtgttgcaaattgttatgtgttctggtattccctcagattgaacattagccagagctctcggaatagggtcaacatctgctgaagctgggatctgacaatagagagggaagagtatgagagttaagaataaaatggaatggtgaaaaacccacaggatacttgtctgtgctgtgtggcagcagagttcttttcgtccctacctggactttggctaggggtgtaccactgtctgggtgggaggttgaggctggggagggcagggcatgaaaaacacccatccatctcctcatctggctcaggagaagttgttctaggcccagcagctctcaggccagggaggggagggcacacgcctctgctctggacagggcttggctctccatctctctccatacccagggcccgtccaagtagtccgagctccttgggttctgtctggtttcctagtgatggtggccaattccttctccatgaaaaccaggatcctgtctcagggaaggcagtctggggtcagtgctgttaatggtatttacctgatcgaacaaagagctcacccatccaaagggaggggatccacatgggatgcccagagaacagagccagagaggaaaacctgtcggcagagttccaggaccctttatattatggtctctcaagttcccccatcaccagagggaggtgttttatcctcatgttttttactggcaagaaatctggagtatccaagaggctaggaggctttcctgtggacccacagtaggagatggagagagggatttggacgcagttctgtctggctccagagcctggacaccggctcccttatccttcctcctcacctctattgacctccattcaccttcccatggagctctcaccccatcttcccacgctgcctgatgtccatgtccctggtgaccctgctgcaccttgttctgtgtcttgccgctcaagcctggctacattttaggaggttatttaggctccccaggactccagggttgggaaccaatgggccacaccctacagccctgtgtcttgagcagctgtgtgccccccagccttggcacaaggcttgtcccctgggatcaaaagcacctgggttctcatccaggctctgaccttgagcaagtcacaactgctctgggctcacgccttatttctaaaatcagactccctatgattgttctaggtccggaacacagaccctgaagccagatgaccttggtttgaatcttggctcagtcacttatttgcagtgggacttcggctaatcgcttatcctctctctgacttcagtgttctcatctgtaaattgtgaataataatgtatatctcttatagggagatgttaaggattaaacaaactaataaacataaataatttagaacactggcatatggcaggtgctagattagtgccagatatgagtgtacgaattattactattattgtgcatgcaaagggctcagccaaggcatggacataaatgaagggattggcaactggctgctgatgctgctgctataacccgtgccctttgcttccttccaggagcttgggcccctgccgcagcccggtagaggctgtggaggtctaccgtccggaagcctggttcccagccccgtggcccattcctggctacggggagtggaggctcccacgaggtagcggtggcctgcagcggcctcctccccgcagtgaagcatgggccagaagctctcggggagcctcaagtcagtggaggtgcgagagccggcgctgcggccggccaagcgggagctgcggggtgcagagcccgggcggccggcgcggctggaccagctgttggacatgccagcggcggggctggctgtgcagctgcggcacgcgtggaaccccgaggaccgctcgctcaacgtcttcgtcaaggacgacgaccggctcaccttccaccggcaccccgtggcccagagcaccgacggcatccgcggcaaggtgggccacgcccgcggcctgcacgcctggcagatcaactggccggctcggcagcgcggcacccacgctgtagttggtgtggccacggcccgtgctcccctgcactccgtgggctacacggcgctggtaggcagtgacgccgagtcgtggggctgggacctgggccgcagccgcctctaccacgacggcaagaaccagcccggcgtggcctacccggcctttctggggcccgacgaggcctttgcgctgcccgactcgctgctcgtggtgctggacatggatgagggcacactcagcttcatcgtggatggccagtacctgggcgtggccttccgaggtctcaagggcaagaagctgtacccggtggtgagtgccgtgtggggccactgtgaagtcaccatgcgctacatcaacggccttgaccgtaagttgtgctgggctggggggcagggctttcagaggctgccaggccctagggaagctgggcaggccacacctccatcgccacttgggaggatcctgcaatgtggaggaatggtcaggacctgggtttcaatcctgactctctgctggcttggtgatttggggctgtgccttagttctcccatcggcaaaagcatcacgatgatagtaatctagctcacagttgtaacgatcaaataaagtaatagtaatctagctcacagttgtgaagatctagataacatgtgtgaagtgctcagaacagtgactggcacccaacaggggctttgagtgttgatgccaattaccaatcttccagtctgtacaaaggttgtaccaaatgacccaagctagtcacaatgggaagacagtgacaagtccccagtccctgcacttaaatgccatgtactcaagttattgataagtaataagtactgataaccgtcctttattggccatctactgtatttgagaggctgaacaccccaattccagcgcttatgggccaactattaaaggggacagctgcctcttatctccagccgactgtcatctcacgggaatgaaaaccctgggttgtggaatcttgtgactttttccaagagagcccagaaatctagcttgtgtgaactgttccaatttttaaagttgacagctgctgaaaagtctatatgggcaaacaaaatacccttgcaggctacaaaccagcccacaagctgctggggttgacccctgacaactctatggcttcctctcatttaatatacacaaccatccggcaagataaaaagtgtaggaacaaagacggttattggttttgggagggagtcactcagggagacagggtggcctctggacagaggcacacgtggctgcctgtcctgagttgaatcccagctgaggggccaggagccaggcacttgtgggcttgcacactccccaacatcagcccactagcaccaatccagacttcctgccacaccccaatgaagctctcagaggtggcgctgaaagctagaatttccagtttattcattctaaataagagatgtaattaccagcccctgaggcagatcctccttttagaaataagaaaacttaagagcagagctacagagagccagaatcagggttccccccagttctgatggccctgaagtccactcgtttcctatgttctcccctttagatgagggactgagagtaacactccagaaaagagtaacacttctccagaaaagaagtcaaggacaagattttactcaagcaaaatttacatttactggagcacaggaaggggacatttgatggtttccaagggtggcaggctaatggaaaagtggctgctggtatgctcagcactctggcataattgtcgacattcttgctcatattttatttccgtggttgttgcctacaattgccattgaatggcaaaatgttgttccattttctctgtttaatgggttaaatctaggaactgatgattatgtccctgagaagggctaatttagtcatcacagtgccttgtggaaagtgtctggagccttctgagacatagtgaccaggcaaatcccagtggtgagaaaaccaacagaaacaacaaacaatctttatttaatggaattggaaaatttatttgctggaattaatcactggactagaagagtggccttggtgtaccaaggctctggagtctgatgtgacttatttccaagtgctcagtggttttgtgtctttggtgagtcactcttactccttaagactcactttattcatctgcaaaatgggatagtatcaggtcccctttttgctgctgtaagctcttgtgtggtagcaccaataatatggtagctgagatttaaggcctgacgttgacacccagtgggagctaccagagccaagagttacactcctgttgtaggcttcctcttggctattaattcacttgggctttattggttgcctggttttcaggtgcaaagccaagatgctaacagggttgcagcctgtggggccatgcatattggaatcaggagcagggacctacctcatggagattgggtgaggaaaggcagttatgtttggggtattttaagcttgtgggtccttcaggtggttgaacaagtttggtggaactaaaatgtgaagtgttctaacctcctccttactggcagtgatttttcaggttggctgaatctggaatactgaatctaggaggcaagagaggccagatgtcatgggatgcaggcctggggcatcttccattcagtgatagggttggcttatctgctatagcactagcctgttctctaggtaggggtaatgttctgtatctcagacaggggtgtgactgcagaaaagggaagctcagcttctctgggcttgaaaggcctattcatggccagcctgggacaatctctgactccagagtgggccataggagaagctgcagtggagtctcgcagggatagttgggaagggactgtgtgatgcctatagcctgtgtcctgggctgaagtccaccatgaatccctgggtttgggactagtttggctctagggagtctctgagcagggaaggtgacccaaggtggattctgtgcatggaaaggattctgagttaatgtcggttgtggacatggtggcaggtccccaaactcagacttgattggtgtgtgagggaccagagtcaaagacatccttggaagcaaaaggcaggccaactctctggggttacttccccacaggatcataggaggagagaactctgcccggggcacctcacagagccgggtcagaccctggccccagcactcaacaaatggctgttggcgattgcctcctctttctgaacttcagtgttctcctttgaaaaaggatgaggatgataaagctcaccggcacagagcagacacatagcaattggtgcccctgtgttgattaactaggtgaactgaggcaaattctggggttcacctgtggcttaaagcaaaatggccttaatagaggcttttcctctaacatgatgaaagtaaggtaatggatatcactttctcaatttttgaatttttattacggtaaaagcaagacttagaaagggctcactacgtttaactctggaagcatgtattcactgagggcacgaactcctggaggtgtgatttcctattgcaaatgcataacattgtcaaaccttctgcaagtggaattgttttgctacactgtggagtgaaatggctcagcatctcaaagctaactacaaagagctgcaggacgcacaggggccctgccatctaagtgaactgagaagtatggagccaaggccaggcaaatggagaagctgtcccaggggttgtccagggcacaaataataataataataatagcaacaatagcaacaactaatacttatgtagtgtttagtctgagtgggtgaggggggtggtattctaaacactttacaatttctttttgttgttgttgttgttttttgtttgttcatttgttttctagagacagaatctcaccctgtcacccaggctggagtgcggttgtgcaatcattgctcactgtaacctctcactcctgggctcaaatgatcctcccctcagcctcctgagtagctggggctacaaggatatgccaccactcctggcatatatataaatatgaatgaaactggctcaggaggtaatggctaatttaaaaaaaaattttttttgtagagacaatgtctcactatgttacccaggctggtcttgaattcctggcctcaagcaatccttccacctctgcctcccaaagcactgggattacaggcgtgagacacgtcacccggccattttgcaaattttaattaatttaatttttgtaatgactctttgcactagtgctatctatattatcatcttcagtgtatgatgaagaaattgaggcacagagagcttgagtaagttgctgaaggcgacactacgagtaactgagggagcctggattcaaatggaggcagacacgggcaccttgtggagacgtttaccctcaaggcagggagagaatgcgcaggagcatctgctccatctggctggtgaccgtgcagcccagggccaggtccttgccttcagcagtgagtctgggcgagtctctgagatgctgtccctgtcatttttcctcctctggctggctttacctccagccctcaaagctcttggctcagcatggaactctgcagggtgttctgaaatgctaagttgtataaaggcatccccagcagtggccatggatcaggcatgcttgatcactaacaggggaatgtcactgcaaatgtctcgactgctgtgaggtgtgggcccctgcggtgggccaggcctttggaatctgctctgggctgctttctggaattgctccgtggctccccagctcctctctccacatgcaggcggcaggagggctgacagaacggctttgtctcacatctcggagttcttgggtggtgagtggtatgtgagtgacacaggaataagaggggagtatcagacagagacaagaggccttggggtccctggcagctttgatttgggggcattgatgacacttttgttggctcccatccatgttctgtgccctgggcttaggattttactcattttttttttcttttcgtcgcaataagtcatgaggcaatgtggctgttattatccccattttatagatgaggaaactgtcttgggaaggtaacgaatttgcccaaggccacacagctagcaaatgacacagctgtgcttatacccagctctgcctcctatgcctgggccaacctgcccaagcctgcccaccactgagcatggcctgaccccacagaacgggcgccagtgtcagggctgactttcacagggtggagcgtggaaatacaggtatcttgggcctaactggctgagagggctttccccctgcacggagccgaggaagctgtatttccagacgtctttcctagatggtttaattgatctgccaacaagtatttattggctcaatggctgagcagaggaggctggcagctagccaaggcttctggtattgatgaaggccagagagagtttgctctcacgatgactacaaggacactgtctccttgccagagctgcactcaagaccttctcgctagacccccgtgcatctcccggggtagtgaggtcctcccagcctccaggacatctggacttggcccctctgggcctggtcgcccctttgcccccatcccttatcaatctgtcctgaccccagctcacctccaggcctcagccgaggactctggctctgcatggggagtttagcactgagttcttctgcatctgcagggttcactcatttttccacccataggccttctttccccaagtggttatgaagttcctcagggcagggatggaaacccaggaggtatgcatggtgaactgggaagattagggacatcatatgtgcctatttacttgatatcgcttggatatttgtttcctccaaatctcgtgttgaaatgagatcccccaagttggaggtgggggttggtgggaggtgattgggccgtggcagatacatcatgaatggcttggtgccctcctcgtggtaatgagtgagttctcactattagttcatgtgggagctggttgtttaaaagagcctggcatctctcttactgtctctcttaccatgtgacacacctactttccctttgcctttcgtcatgagtaaaagcttcctgaggccctcagcagaagccgtgccatgtttgtacagcctgcagagccctgagccaaataaaccttgtttctttataaattacccagcctcagatatttctttatagcgacacaaaacagactaaaacattactcttgaaaggaaagctgtgcatgtggcaacagatttaaatactaccaaagggcgtatggtgaaataacccctcctgtgtatctcggccccccatccgctcctgctggcagccactattagcagtttcttgtctttccagagacatttgtgacagataatttttagatcatactgaaaacattcccctgtatcttgttttctcccttcaatggaccttggcagttatctactatcagttaatgtagagctgcttcattctttcttagcagtcgcatgggtccatgatatggttgtgttataatctaattacttagatccccatatttggacatttaggcagtttccaatctttgagcatacattttgatcccaattgaaatttcctttctgccccctctagctaattaacatccccaagcctcagttttcccatctgtgcagtgggaataattatatgtacctttcagagttgctgtgagtattagaagtgatgcagaaatgaagcactgcccagcatgaggctcacagtaggttaatattgatatgcgttccctgaatttctgattgcggtgctgagctcatcttgcgcacctgatgaaggctcgtgaatgactttgtttccagtttaaaatacagtagaatcacgttaattttttctctttttaaaatttattaatttgatattaaggaggcttcagacacattgttggattaatattatttgaggtgtctaattcagccagtccttacatagtgtgtagtcaacataagacacctagccctttacttcacagaataagcccataatgtgtgtgttttgcttttctgttattgctgctgctgctaatggtgaaagtggtggctctttgctgtggcaactgcatcttggccttttcaaccaccctatagcagcccttgcaacagagtacatagtcggtgctcagtaaatgcatattaatgtcctggcctcccaccaactgaataagcttttctttcctctgccacagggggacttgagtcacagttggctggagcagaggggctggctatgagctgcccctgagtgaccctttttccatctctcattgtgtcctgtgtacagcacatctgtccctgcacacaggccaagcagaggctgcttgatgggtcaggcatgtcaatgcaggatcctgacattcagaaactgccccctaccctttgtttgaaaggaacagtctctcagttgagaaaaggcctcgatcagatgctgtggcccttctttgaaggaggttttcatattaacatagtcataattcggttcatggaagtctggcttgcagaaaggtggctttgaaatgcaggtgacagcatttgaaatcaggcttaatcaggacaagcatcaccgtgggccacagcatggtcttgtgggaagagcagggttcaggggtcttccagcactggcttggcttcagtcctgacttggtttctaattagctgtgaccctgaacaagtcatttcatgcccaagccttcattttctcatctgaaaaacaaacttactttgctacgaggtgtcaggatcatggattaatatatagaaagtgactgatctagtgcctagaacgtagctactgaaaaagcggtaggtttaaaaatggctaattatgactattactgctctcataaattggtaaaattacagttattaaatatagaaataattatggttattaaattttggtccacactgtgaaactgaaggatttcacacgagggaatctgtggtggtttggatggtcttggactcgtttctctctaagatacatgatggaaatgccacctgaggttcacaggccattgtgagtttgttgcaaatgagctgggagtgtttagccttccctgtgagcggtttccggctgcatgtcttattcaagtgtttctctaaaaggccgcagctccccgtggtgacttgcctggtggacatgcattcacaaggatacccaaatgagcagcaccttcaccagctgtgtgcaggcagacattcagcagggatgagctgccgaggtggcggccctgagggccggcgtccacctctgcgaaaatagtgacttggtctagttgtgggctggccattattggacctttgggaaaaagggaaggggaagaggtaaagggtctcaccttttcaggccctggcagaagggtgaaggcaaaggccccagacacagggatagaagagatggtatctggcagccaatgcaagacccaccttttacagatgggagctgactggaccagagagctgggaggctttgcccaaggttacctgccaggtagtggcagaacctgaactaaaacccaggcctccaatcccccttgaaaatgttccccatcagaaacaagggagtgagaattcaatgcagtttctgagtccgtattgaaaaacacagctgtgggaggatgtaggagcttaggaggagagtgattagggccaggggtgatgctgatgggttggagggactttctgaggggaggccttggagcttgggcagagtttagaccagtgtctccccacaacacacacagatgaagaccctccatggcttctcagtgcctcctgcatgtcagagaccctgtcctggccgccgctcagaccatacaaccagggggttagcacagtcacagatacccaggtaagaactggtcttcctgtttagtacctgcgtgacctgggcataagtttcctaactttgcagttcctcggtatcctcacctgtaaagtgggcatagtgatggcacttaccccgtagagttgtcagcaacacttctcaaacctcagtgtgcattcaagccacctggtgaccttcttaaaatgctgattctgacttagtaggactgggtcgggcccaagattctgcatttctaacaagctcctggatgatgctgatgaagatgtaacacagatcaagggcccccaatcacagcttatccccacgccccaccatccacccatctacccgccatgctgaatgatcccgcagccaagctaaaatgcatattccagccgggctttgtggctcacgcttgtaatcccagcactttgggaggccgaggcaggcggatcacttgaggtcaggagttcgagaccaccctgtccaacacgacgaaaccctgtctctactaaaaatacaaaaaaaaaaaaaaaaaaaaaagccaggtatagtacacatgcctgtaatcccagctactcaggaggctgaggcacaagaatgatttgaacccgaaggtggaggttgcagtgagctgagatcgagccactgcactccaccctgggcaacagagtgaaactgtgtctcaaaaaagtaaaaaataaataagataaaataaaatgcgtattcctctgtgccttggtctgtgttgccctctttgttggaaatggcccacttccctgattccagctcagcctggggttaccgagcctggctctgccctcgtccttgccacctggctgacgccaggccagtctcaggccttgcttggccctgctcccgacaaggcagctatgccttctgcatttcctccttttcacgtccggccccacttcccttcccagctaccaagtgactccatgtatgtgccctggaacccaaattcttatagttgccaatgcagtgtacacgagtaaatccacactcttatccatgaatgttcctgtgaggatgactttgtttggcaagggattactgcaaatggaaacagctctttgttaaacagtcattgattgagcactcacaaaaggccagacactgcccagctccaccgccctgcacaaaggcttgtcagcaccctatgcagcatagctcatttaatctccacgggtgaggagaagtgctggtatcacagtctgcacatgtggagattaggcctgagggacatgaagagccagcagttgcttggggggtgtctgtcccgaacttgagtccaggcctactccagcacccacacctgtaacctctgtgctactcagggtcacgttgagtcttcagtggttttgcaggtggtcccaggccttggattgactgtgcttaacaagagtttactgaagccagcattggcaggccccagtaccacagcacttagatacccttaaatacagtacagcaaactgcattcactctgaactcttctgacttgctgatgattctgagtgggtggtgctgggaaagcattgaatagaggaagcaaatttgccggggcgggggatggggtttaagtgagcggggagagccaatgccctgccaggctggcggcagcctttatttacagggtcgggagccagctgatttgctttggttaaagcaagggggcggttagcgtgagttacggcctcgcccagacactaataaggctgcttgtctgaggcattccataattcaagcaaaggctgtgccgcttaatggcccttcttcgtcagatcttccaggactcggtgcctccttaatgagttatttgcttgggatgaaattaagccgagacagcgtgagcttggaaaatactgccgtgcaggctctccccggttcttcatccttctcagcggctgctttctataaatagagccgtgagttctgcttcgtgacccgcctgctgggagccccagtgggcgcctggtgtctcccatccctcttgtctcccacgcccatgatctcactggtgagcagcagggggctggaactgccagcaaagaccttgtcatcatcccagctttgaagtcatttaagtagatgcttctgagtcgatccagggagccacagctgacttccagatcttgtcctctttgttgatgtttctccctcaaaatgcaattcatgaggaggtcccagggtgagagcgtgtttgcttctggcgtgttctggggtagaggacagctctctgcctgatgtttgagcctcacgaggaagagcatgggagataccgttcatctcctaagggtgaggggtcacccttctggagtgaggggccacgggtcacaactgagggccactcacagtgcttatgcagaggccaggccaggtgccaacagtgggagtgggctgtttagtgagggctcctttggaagcccagaactcacaagttgcctcaaggaagtggtgagcataaggctgcatgtggattgtgggaggcggcaggtggtccaggaatgagaaaccgctcaggcaccccatcactgcatcaactgcacgtctgccatggtctccccccatctcctctatcttttctgttccctcataatttgaggtgccccttggctttggctcactgtggccttggcaactttataatgtgcaagctggcatgctgtgttcccagatcttggtttaaaatcctgtgagtgtctgatgggcccagggcttctcctcaggtgcaggcagaggctcccactagccctctggttgggatgggcctagctgcttattcctcagctgtggaagagcttggcccttagcatacttgcctggacctcagtatccttcagggcatgtggaagacacagatctctgctgtctctcacctgccgaatcagaaacccttgcagtggggcttggaacgtgtgtgtcacaagcttcccagttgacttgtgccatcagtccctgcactggccagaagtcagctgcctggaatgcctggctggaaggagggtgtggggagtgcaaggtccttaggggcagggtatgctggagggagccacaatgctccagattcccaggaaccggttggggagctcagtctagggcagaagcaaggatcaggctcccagtattggctggaacaagcttgggggacctgaagatcctttccatcaactctgccacaaaggaaaggtgtgtttagcagaattcaggggctttcctctccaaagggacaatgtgtccatgcaacctaagtaccagtggtagatgctctaatttgaaaaagcagcttcatttcactgtttcttcctggtacctcctgaggggcctctgggttaagcgccaagcactctgccaaaagccaggccctccgctgcagttccaggaggtacggtgctcttgtgtgcaccacttctgcaccctcaagattgtgtagtacagcctcaagtcctcccagtcactgcccttttcccgacagcaggggctgggctgttctatttgtcctggcatgtagtggattctgtgtgtgtttgttgaatgagctgctgcatcactcagaggccacacggtaggatgaaaagcacatttggggccgggcacggtggctcatgcctgtaatcccagcactttgggaggccgaggtgggcggatcacaaggtcaggagattgagaccatcctggctaacatggtgaaaccccgtctctactaaaaatacacaaaaatagccgggtgtggtggcaggcacctgtagtcccagctacttgggaggctgaggcaggaggatggcgtgaacccggcaggtggaggttgtagtgagctgagatcacaccactgcactccagcctgagctccagacagagcaagactccatctcaaaaaaaaaaaaaagaaaagcacatttggttggcagcagaggcccagggaaagagtgcccatttcccacagcatcccacaaaacagaaagagtatagacaagcttcttactgaaattttggagaagggaatcctgagaaatttccagttagctaccaatagtaaattgaaattcattgcaccctgcccgtagctacttaatttgatatgagtgtaaagaagccattccactttcctcaatcacatgcaatcctgctaggtcaatcggccaagcagcgtggggagggcagtgacacccaggcatctatccctgcaccagtgtttatgaagggcctgtggtgtgctgacccttagccggaagctgggcagcagtggtgggcaaggcaggtccagtttccactctcatggaggaaacagagtaaaccaagaatacatgcttatgaaaattcataaatgcttatgaaaatccagatatagaacaaagttggagaatatgataagggagggaggtcagctgctgcagtggtcccctttgggggaggggcatttaagtgagacctaaatgatgaggcagagggagccatgtgaagatctaggggaagagcgagtcagtggggaccaacaggcaagcccatggctggcagggctggggatcatggagggcagagtgggggtggtgaggctcaggggtcagcagcagggagacaccaacatgtctttccatcttttagacttcagtcattccactattttttttaaaagttatacacaatctcattttaaaaaagtaattcttactaccagtctcttttccactgggacaggtctccccgctgctaaaaaatggcatgttgttggaactttggtcagggtggcctttggttgaggtggatatggccatttgcattttacagacaagttaattgaggcccagaaaggttgagagactcgcccagggttgcaccatgagtggtagagctgatttgaacctccatcttgtgcttttccgtcttgccattgctccagaaaactgaattccaggctttttaagaaagcatagagttccctgggtctactaagaaccatctggcagtccagccaagaaaaggggcctctgtaaagcagtgaactcagcgtgagcttcggtaagtctcaactctgtcctgttcttgggcagggcatttgtgtttcagtcttccctacctggggcaagtgagtgacccagggcttggagcccaccccgacctctgtagctgtgacatatgtcccccgccttgtccatcatgctgcagcctctccacattcttggctggaccctgggaagggcagcaccagggcagggctctgcttgggtaagctctggcttccccttttgtcacctggggtggtggagctcaagctggcctgggcccttgtcaccaccatgctgcgcaagccacccaggagagaagtggtgaattgtgggcttgtatttcctttttggctgacacaggcaacctcccttggatatttaaggtgttctgccacagtggactgttcagatatgtgaaagttaaaaaagcatactcaacctgaactgagttgtacccagagtctggtgtgggattataaaaggcaggaggcggacaggtcctggaaagagcacttgtctgggagccaggaaacctggcccagtgggctccagcttgcccacttgctctgtgacctcggggaagtcagctcctctctttgtgcctcagtttctccactgcaaggaggggattggataagatgacctcaagtggtctccatcattctgcagtctctgagatggagggactgggcatctggattttttggatgacaaacactttacactgtggtgctacatcagctccacatctgccctatccaatgtgggagccactagccctaaccatatgtggtcgtttaattaaaatcaaataaagttaaatgttcagttacttggttgtgctagccgcatccaaatgctccacagacacggctcgtggctgccctattggatgagcccatgtaaaccattccgaccgcggctcaaagttctactggatggggctgctttagagccactggagagggctgaggagccccagagagagagcacaggcctctgtttctgccatgggacttcttctgggccagtggtcagcagagtggctccagggcccagggagtgagttcaagtgggggtgggggtaggagaaagatttagcccagataccagccaatgagtgtcaggctgcaggaccagaaaaccttaggcgaatgtcaaaggtctttggtggtggggggtagccactgacaggaggtatgccaggaatgctgaggagggcctgggggacagcaggggccaggagctctgcggggggaggggcagctgtgcagaacacagtggcagttctgcagcaggcctcttgctagctctgtgtccttggggacgtccctgagcctgctgagcctccatttctttgtgggtgaaatgggaaaaataagaaagagggctgttatggagatgaaataaagcaaaacctgtgaaagccccttgtaaatcgcaaaggcctggacggcgttaggggctacttcatatggcactattatttatctcagcttgtaatcctagactgtcctcagttatgattttaaggttctggggtgtccatcctgtctttctgatggggctgtagaccatttagagaaggagaccagccatgtccctcctgtatccccaacagccatgaacagtgctggtggctgccgcatggggagcacacgtctttctcttttcctcctgacctggtggcctttcaccaggccatattcctgccccaagagttgttgaacacattccttgtccctgacacatgtgtgcatctggctgggtctggttgtcatttgctgaacccatggcccatcgtgagccccaccacatgaaaacaattcgggggcagaggtcaaaagccagagctgggctttgccaggtctcccagggagtgcgcctggcaggaggtagcccagtgccaggctgcatcaggcggcccctccccaggctgggccaggctctcatctgcatccatggttgggaggtggcatttctggctgacttattgatgatggattgtctgctacactctagccctgggtgggttcattgctcaggtctggctttggcttttcgtgaggtccacaccacagacatgcagaacacagagaggagtttgagccctgccagataaactttttctgtcacagaactgctgtgctttccagcaatataggcggtgaagaaaagccaaagtaaccatttgatgattatctccttgccccaacccaggtgctatgtatctatctatctatctatctatctatctatctatctatctttccattaaatccttttagccccatgtgtgaagtgttaataatatccccatttcacagatggggaaactgaggctgtgaacggctgaaaggtttcagggccagaactagaatttggactctagtctgcctgatttcaggctcaaagcgtccctttcagaatgtcctgagggctcttttcttcccctgctgtcttcactctgaccatgatgagctgcaccaggctttctaaatatctgaaacgctctacgccatccctgctttctttgtttggcctcagcgtggtgatctgggcttcctcagatttgggtttaaggccaggttttgctgagctgtgtgacctgtgtccaccatggacctccccagaccatgatgagctgcaccaggctttctaagtatctgaaatgctctaggccatctctgctttctttctttggcctcaacgtggtgatctgggcttccttagatttgggtttaaggccaggttttgctgagctgtgtgacctgtgtccaccacaggtccccccaggtgccctcactagagtgggggtgcctggccagcttatttgatggaggagatagagggctagagtgccacgtgcatggcttccccggctggtttggagggcccatggggactgtgtactgtgacttttccaaggagacaatcactgttgtctccacactgccacccccccaccctctgtagagccctggatggtgccccttatggtcccagggcgtgtccagcagaagatatgagaaaggcccctgccccacttggggcttagctctgcccctttctctgggcagggccagggaggtgacccttttgtgtggcacccagcaccagaacctgcttctccacctcccccagcagaggagtgcgacctcccagccctcagtgcagcctccacatcccccggcgggcaagtctctgcctccatgcttctgcttgtgctgtgctccctgcctgatgctggcccacttctccacctgtctaaagctatcctttctggaggctccgagcaatgccaccttggtttctaaagtcctctttaatgaccttagtccatattgcccattctgttctgtgctgctggagcacatttgcggtggtgaagggggtctgtggggtctttataaggcatggccccttcttagtgagcaatcctcacaggcctttttctgagactcctcgtttgactctggcccctgcttacctccctcccctctgaactccagaaccctctggaggccctgcagggtagaggggaaagactctgaagttgggcagaaagcctgggcttgcctcacagctctgccactgcaggctgtgggactctgctctttggcgtcatcatctgtagaatgcggctaataatggcagagcgaggtggatgaggccgcagtgtgggaagcccggcgtcgctgggtagagctcatgtggatttacttcctctcccagagagtaacagcatctgatgcagacccagggagacagtaggcacacgataaatacttcttgacttttttaatgctttcttttgtgatgtttcttttaaaagcaacctaaggcactctatggcctggagcagaagcatagggcttgctcagcctctgaaggggcctctaaccgtcccttccctccacctcccccacacccctctcctggcctctccttgccctcaccctcatgccgcctgggtggctgcactggcctataaatcaaacgggtccctggagacctttgacccaaaccagatggctgtactatgccagcacagagtaagcttagcttccaacaatgcttggcccccctccccctgcctgccctggggcttggaacatttttaggcagctgccctgtcaatcacaaacacttggtgatcccagcccgggcagcagctggaggctgtgacctctccaagacttcagggaccatcttggagatattccattaagccatataaagatctctggagggtctgtggtgtctacttgttatggcacaggcattaacctggaccaatagaccaagctggcattccctgtgctgctatctctccctcctcctcctccaagaagcttttctgcactacggcagctgctggagcttctatagctcagaatgtctgacccctccagatgctcattcataccttgttcattctttctgcaaacatttactgtgcttcatctgcctgggcccatggggaagatcagacactgcccttgtgccagtaagtccgaaagacagctatggatacagaattgtaggaattggtgataggggttgtaattgagcaggaaggccagggcactgtgggaactcaagatggatgcactgcagtgtcagaatccaggacagctttccagagaggagtgcttgagccgagtcttggaggatgggttggcatttgccaaatagatagggtggcagaagggtgcttcagatagaaggaatagcatgtggaaggaaggtacaggcacaggatgggaaccagcttgatggattcagggacctgcaagttggacagcatgctggaagtacacctaggggagaaaatgaggagttggaactgtatcagtgagaattagatctgcttgtttgcaaccaaaaatgcctaatactatgggcttaaacaagaatttctctctcatggaagagaagtctggaagcaggcagtgcaaggatgttgtggggctccatgatcactgccccaggctccttctgcctgctgctccaccttcctaccttgtggcttccattcccataggtacctcattgtctggaatggctgctagagcttcagccattgcacccacattccaggcagcagaatggaagagctaaaggagggcacgtgactcatcttttaaaagatttttctgaaatgccttactatgcttctgtgcatagcccaatggccagaacactatcacatgaccacttctagtgcaaggaagctgagagatacagttctgatcagtaggtgctgcctagagcactgttctgcaaaggattctgcagcccaatcttacgtctgtgggaaagaacactgtgatcaattaatgatgcctccctttggtgtgggtgtggagccaatagcatgtgtcttgctggtcttctgccagaaggtcccctccctagggattcccaaggtttggtgcagctcctgcaaacagagctggcacatggccagccatcccccaaagccccaaagcagagcggaatttaggtgaagggtttcttggtgctctgcagtctgattttatttctgatctgcagcctccttaaggcatccattgcccttcagcagggcttgagtctgcagaatggtctgtgtggttggagcatgaattaggaggaaagaaggaaatacaatgtcactaatgtagctgcagcctcatcccctggtgagaggttttccaaaatgcagtaatacagaaagaatttaagggaagttctgagccattttattttcacacctggaaatgcattgtcttttggtttaatttcactcctgctgtgtgtcacagcccagggtttccttagctgtgaaagggggtaatactaccttccttgaagggtttttgagaggatcacatgaaataaaagagggcaaagcaggtgggagacacagagggtagcaattaggtgcagagtttatgttcaaactgcctgggttccagtcttagctttcctgcttgcttgctgtgtgatcctgcatctgttaattaacctctctgtgcttcagtttccttgcctgtaaaatggagatgatgataatagtgcccaccttatggggctgttttgaggcctgtacatatgacatatacataaacatcttaagacctggcacacagtgtggacgtgtaagtggtaatggctctttggccatggtacagtatttggatccaacaggtctgggataagatccagggtaaattactcttctaagccccagtttctttatttgaaacaaggataatgtgacttgccttgcagagtgaggattactgacagaataactgtaaagtcctgacacataggacatacgcaataagttagaactatggtgaagattataaaatgataccgtgtcccaggctctgttatcagcactttatatgtgtcacctcttttatctcataagaacactatagaggcaggtggtgttaacattcctcttggggaaactgaggcatagaggcttgcccaaggtcacgtagctggtaagaaaggaagctgagagttgatctcctgggtcagctgatccagagcctgtgctatcctgcttgggaacactgattctgcagaggagcaggccctgcgtttaagagcagagggaaggggataaaggtggcccagagcttcagggccagctgcctggaagatgacacgcgcacagcacagaggactagggcttctgagccttcacagccagatttgcatgcaggaccccgacccttattcaggaggatgagctctctgagcctatcttgaagggggctgtccttctggggctggcgtagcaggcagtgtgcacagtagtatggctgcagtaggttgactggccggaaggagacctctaggaggcctggagcatgaggctgcagaatttagacttcctgtaggcagtgggagctgtgtgacagtctgacggagcatgatgaaagccaggtgttaggaggattctcctttagtgaagtggtaggaagcaccagggggccttggacagacaaaattgaagaaggtggagggaggcaggccacatagggaggtaacccaggaagagggtcccagtatggggtaaaatgtccagcatgtgctgggggagcccccagttgtagggtcccagtgacgtcaggcactgtggcagctgctttacatccatgatctcatttgatccttaaatagtcctgggaagtgtgtgtgatgtacccattttccagatgagcaaacagcctcggaaggtcaagtggtggcttgaggttgcaaggccagggagtggcagagctggaccagggcccagggctgcataccaagccacagagtcctgcattccccacgtgcccaccaaggcaaatgcgggcagggcagaggaggaatgggaggggatgatggcaattgtctctagtcgcctgtgaggagttgctgccggatgcgttctggccttgtctgtggtaggggtggggagtggtgagatgcttctgtactttacaaccttaaatgatagacttttctttaggaaacaaaagtttggttgggctcagtgagcaggaaaatggaagtgacccttgagcggagatttaaagccctgttggccatttaggcagcactgtgtttaacagctgagacacagcatcagggtgataactccgcagtgtgctgtggggtggggaatggcccaagggggtctctctgctctctgagttccatctggtcctgaaactccgtcccccagggctctcttggaaatggacccaggagctacccacaccttcccctggactgcagaagctgttagtgctggcttcaagggaagttgttgccagcggtacacagggacacagaaaagggcgcacagttaaatgtactgcgtacatccatgctacaaagaataatgctggaaggtatattccaaacaggctattgacgattacttctaggtggcaggataagacgtgaattttcctgcgtctttgcgcttttatgtacttccaaatcaacacatacaaaaggatataactgtgaaaattctaaagtgcctctatccccacttcctagcagactcttggggtgcccccaccacatcctctcagctcaactggttaggtactgctgtgggcatcagtcagttttgctttctcctaagctgcaggtagccactcagccggatgcaggcagcaccgggatgtgcaggggagttaacacccttggggatacccctcaatgactcggagacaggagtccatggttaagtgcccccagctccccagcctccagggagacagttctgaggtccatcctacatagatgctcagagcatcctagtgaatgagcccaggatgcccacagcagtatgcagctcattcacacattctctctactcttcctcccttccctgtctcactttctccgtctctcattttcatctcctgagatcctcccacaaagctatctgcacccacatctttgtctcaggaacccaaaccaaggcccaatctgaccaatttctcatagagctccacagatatattctaggcatatataagcacatctgtgtccatatccaaacactgatatatacactttctttttcacagagtacaaacggggccacactgaacttaccagtgtgcaactcgcttccttcatgattgaatgaaacattgcaggaggaatttcaggccaaggagcccttcctggcagcgtcaatcctgcttagggggtcatccccatcctccaagtttgggaccaacccaagccagaggctactggtccttaaggaaggggtgtgtgtgacaagtttttgctctcttcaggtggacgagggtccaaacactggctgacctttccccatctgcaccgggaggccagaccaggatggggatttgcagccacaaagattggccaaaacggttccagcccatacgtccagcaggagtagaacagtgcagtaaggaccccaggtgcccacagacctcagaaaggatacacaggacacagaggagtcagggagtgaaaggagggctgtgcagaggaggtaacactctgagtcctgaaatctgggtatttgcctagtggagtagagcctggaggagaaggaggggcctagcaggaaggcaaggcaggccagaggccagcttgaacaaaggtggagggaggagatgagtgtggggcaggtaagacagtgagcagaggtggtgttttcaacgtcttggcctgtagttttcctgaatggcaatgaagcattttatcagattttcgcagccaggcctgtgccagcagcctcagggttgggaaccagatgagatgatggacacatttggacagaacctcttaccttattctttggggaaatttgtcaaaagccagttatctttgcaaaaccaattttcagggatttcacagaaatcatttcacaatttttgggtgttgacagctctgccattaatcagctagggtgaccttgggaaagtcactctaggtcctgctttagaattgctttttttgttgttttgaaagcagctgataaaatcttgcagtggggtggggagatctaggaacacttgtcttggttggtgttggccactccctccctcccccgtcccttgtgtttttgctcctgcctcccttacagaccacttataaatgaggggaaatgctaagcagaacaattctttctcatcccctcttctctccctctcttctcctgcttcccagtttgggaatgtattaatatgttggtgttagcccagaatttaaactcccaattctaccaccatgtgtccatgagaaagtccatttttaaattaactgaatctgcacatattaattgagtacctactacatgccaagcactattccaggcactgaggacacaaaacagcagggacaaaacggacaaaagtctctgtcctcatgaagcttatattttagtaggtggagacagaaaatcagtcagtaaatgaacagtaaagtgttagctaatgataagtacggtggagaaaaataaaataggaaaggagctggagtgtgttggaggaggctggggcttgcaattttaaataagatggttgagaaactcgtggagaaagtgatatttaagcaaaaaaaacttgaaagaggggagggagtgagctatgtgggtatctctggggagggttatccaggcagcagaaacagcatgtacaaaggctctgtggtacatgtgttagaacccaagagcaagggagagaggagcagggcctgagaccagagcgaaaccgggcacagaggttagccgatcaaggatgacgtttggctttttctctgagtgagacggggagtcactacagacttttgagaagaagggtggcatgatttgcctaggttttaaaaggatcactttaactgcaatcttgaaaatagaccgtagaggggccagggcagaagtaaggaggccagctaggaaggaggctatttcaattaaggtaagagatgctggtggcttggatcgggatggcagcagtgaagatggtgagaagtagttggatgctggatttattttgaaagtgaagccaacataatttgctgtaaaggataagaaaagagtcaaggataactccatggttttgggcccaagtgactggaaggatggaggggccattcaccaagatgggcaagactgtgggttggggagtggccagcaggggctcagatttggacatgctatggttgagatgcccatcggacatccatgaggaggttctgtgtggacagaggtcaagcatacagatttttaaaatagccatgatgtagcatgaaatcccctggcgaaggagggtggctactgaagagaagaggtcccagcaccaagcccttgggcactgtaatgcttagaaaccaaggctcagtttctgcttctgtaaagtagggataaaagccataaccacctcgtgagcattgtcatggagattagtgagacagtccatgtaataaagtgcatacagtaagagtaccaaaaacatgagtttctattaatgacagaaattattgtttcaacaagcatgatgctgtctacttataagtgcttttcaacttttgaatctgttttctattatttttgaccgtcaaaactgtcctgagcaataaggcaggacataatccttcccatctgacaagtgagaaccctgagttcagagagtgtaagggaagtgcccagatctccaccacatgttggtgacagagccagggctgtcatggaaaccccagactcctgctcctctgatctctctgccacagcctgtaaatgctgacaaatgacttaattaaagtagtgcaggtgctgtttgccagcagtaatgtggacgctgacttcgctcaggatagcccaatggcactgcccactacaggtggtaccaggggcccgggttcatgctaaaaatggccagggaacacaggctgcaacctacagaggtggtgacagggcagagagacttccttttgtcagacagtttccttttggaaggcagatgagcaggtagagctcattccctaccagctcccttcagcaaagcctgtgtctctggagcctgctcagcccagatgctgcttttctcagtagtcagtgtaacatggaacacagcagggagcaaactctggaggaagctatgaacccagagctggcagcatggggacaggcaaggtctggatttgtgggaagcagaatgtcagttttgaatcagacggagctaggttcaaatctcagcttcctttatcccgagctgggagacctggtgcaagtcatttcacccctctgagctttggctttctcttctgcaagatgggagggtaatccttgcttctcagcattgtttaaggattagacataacaatgtagagtgagggcacaaacaaggcctgctaaatagtagatattattattagcattagcattagcatattagcaaaagacttccagggtgaaatcaaactacattcaaccaaagcccttctccttcactaaccatatctaccattctcgactatcaacaaatgatcagtcaagaagcattcattagagccgactacacataaggctttgttgttgatacaactaatacctccatgtgcccctgtgcaccaggagtgggccttgaggctgggatggaactggactctgccagaataactctgggcagctggggcctgctcaggcagctaccacctttgcccagacaccccttcctgtactgccctaccagctggccctttagaggcttgactggcatgggggctcaggctcttgctgtggggtttactgctgctgaggccgggtgagcagcctgggcactgtcccaaggcagggaacgaggaggcaacattccctgcacgggaagggaaccttcctatatggcagtgcacgctcactgtcttgtcaacttcctcacacctgtgctgctgcaaggagggactgctctcccattttacgaggctcagaggggtgaagtgacatgcccaagaccacgcagctgtttccaggctagtctgatgcttgggctctgctctttttcttctgcctgctttctccctccccaggccttgctcagaggaggctgtagtcacaccatggttgctggcctgcagtacaggcttcagggtggctctgggaagggggtggcagtggggctgagaccgcatgacaggaaaaggtgtcaggagccctatacctggatgggatgggaagaggtggtggaagatggggcagctgcagggatgtgggaacatttgcagagggagtgcagggagacgaaatggttctctttcataagagagtctgtagagaaaaaaatcaaagcttcttggaacttaaacctaaaaatgccagctgaatatgatgacaacaacaataataaaatatctagtaatgccatacattgcagtaagcacttttcatattgtcaatcttcccaggaaatctgcagagtagaccttagtttcttttgcacttgatggctcagaggggtcacataactttcccaaggtcacccaactaataagtgacagagccaggatccaaacctgggtctgtctcattccaaaaccttactcattctgccataccgaggtgtaatgcatcacagtgtttgagcttaggtgacatagaggaggcccagagaggttaagctgggcttgagacccatggtggattagtcacagccagtgaagcttccggttctccagagccaccttcccaccctgcggcgctgcagaagggccatgccggctgccaaggctcagctgtgcttctctcccatcatcccacatgcatattaatcacacacatagactctaatgagcagttcaacctctgcagcaggctcagaccagaagccaggggtcctcaccagctgggcatgaagagccctgtgcccactcctccagccctccagagcctgagccgtgccttgctgaactccagcctgagccatgccttggccccctcttctaataccacacaggtctcccatgtgaccttgttctggtcactgctgtgttctgagcctctgtttccacctctgggaagtggaggctagcagcaccagccccatgagatgtctgtaaaaaaaaagccaggcaggtcccggcaggcaaattcccagctggcctggccaggttccctgtagttgttggcagccaggcgtgcttgctgtatctctacagcaagcggtttgcagcagccttgctgcctgaggtcggctggggctcagtggtctgccctgaggctgacactgcgtatgtccaccttctcttcctcctccagctcccacagctcccagtctcctcccgccatggcccttctcatctgactgtgagcctggttggtctgtgtacctctggcctccagcactgggccggctcagagcaggtgcatgggaacttggtgaatgaatgagtcattgcatttgtgcctggctgtttccagatttgcactggctgccatgggacatccaggggagagtctctgctcctgccctctccaggtgaccacggggagatgaggcagttccttatctctgtcagttgcctcggagggagctgagctagacagctgttgcatgcactcttgtgccctgaactcggagaatggctggtgagagactcagggaaggcctcttagaggaggcaattttttaatgacgacctgaagagaacatgggttggatattgtgtttactcctgggcctttttttaaccacccccaaaagtcgtgtaacaaaatgctctcaagtggaaaccacgttattgcaccctgaggaggaagctgattgcctgctagactgagatgctggcttatttcttggcctgaaggttctcccttgtgccctgcccgccccccgccccccgcccctttgcccccctgggagcagccctcaatcactgtctggagggttggtgtacacattctccagccccctcaccctatcccttgtgttggctcaccctgtagctggctgaggacaagcctctcctgcctgtgcttcccttgtctccgagacctcatccattttctcagtggctgcactgctcctcccagagaacatgggagatttagaagtacctcagagaccactagggatgcattgtatcatatgagagaaaaggctccactggctggcggtgtattctgctgccaaacggggcgtgtctcgtcggtccctatttgagttagaggtggggaagaggccgaggcaggccaggggtaggggtgaagaccgcttcagccaccgtgcagaaaggtgcctgcgtcctaggtgtgcgggtgatgccgcagccctccgcagtccccggagagttgctgtgctgccgagactgcggagagcatgttcaggaagggatttccgggctactgcgaggcggaaaatttgagactataagctcctcaacagctgtgtcctctgtattgtttgggtcgctgcctggagcaccatggctacggaatgaatacaaatgcataatggaagaggctgtcctggggcgcagaacagacttattcattccccactcacccacctgctcccttcccggctcccctgagactttgctgggacttggtgttgtcaaaagtcatataaatcctaatgtcatctggctctgttgtcccccactgccccagacatcaggcagaagaagggagtttttacttttctctgtgagaaggatggatgaggagggcctgtgcccacccaaacttcctgggaagctgccaggacctggaccccttgtgtcctgtcccctcggaacattctggaaaatctatcccagtgctttctgcttatgaagctgggcctgaggctaaccagggtggagctggcactgtgggcagaggtactgtcccaggatgagggaggcccagggaggagatgtggcagagattattggagatcttggatccagactcaatggagagccaggagactcctgagagcaagtctggattggggcccaaggcctagatttgggcaagaagagcacaggtcttcctcatccatccttcttacagctaaaagtaaaaactcccttcttctgcctgatgtctggggccatgggggacaacagagccagatgatattagggtttatatgacttttgacaacaccaagtcccagaaaactctcagggaagccaggaagggaccagttgggtgagtggggaagagcagaggtaggaataacgcctgagacagaagaaccagaggtaccttctgcctcagtcagaagccttttatatgcttccttgtagaagaggagccaaacctagaatgcgacaaccacccagggccccagggggaaacagctaaatagttgaataagatggcacatgagtttagtgaccaaaggaggtacatgacttgttagacacttgggacctcctaaaacacaggttgtagtaggaccctcacctcccatcatctggaccttatacttcttttgatgcagcctctgttagtcttagctaattgaacagccagctcatattgaccagtctcagagaacttgtgactttctttcatggaacatattgccaggacagctctccctgtcctgccagctggattgatttccaaggcctaaaaacaggactttacaggaatccctaatgggttccatctaactgcactatgccagatttcctagagtatggagaccatttgggtttctaattccatactctttgtgctgtctctctttttccagcatgtgctgctcacgcatttggtaacatcatagtaaacatattacagtatatagcatcctacattaaacataatggacatgtaactgtgatccaagttgcacgtgacttcttgacataatgcttttttttggtagatgtttaattaaaacatattaattttaactttatgattttctttcagtagtttttgaaccaataaattcaccatatgtctcaaacattttttaaggcccttgaaaaacacatagtccagagccctgtgcctggaatgagtgccccatggttgaaatgggcccattgccttctccctggcatcctggtcagctgaatgagcatcccagccaaacttcctgtctctgatttccttgtcctcaatctattgtctttgtgcatggcttctaaattcatcaccctgaaatacccgttctttccattttcaccctttcttgacagtctgtgatggtgactagaatcaggccatgccactcagcctgcatggggactctccatcagcagctcccagccgccatgtgacccaatgtccctctgcccttacataggccattgctgtagtctggccagggcctttgttggcccttggacccgccatgttgattccttcatttcccccattgttcctgctcttacctagactgagaatgggaagagcttcactagacccagggatggtatttcaaccaaggctttcaaactacagaaactgtttctgagactgcccatgtttttctccagattcacacatttcccatattctgtttttgtttgtttgtttgttttttggttttttttgagacagggtttacccaagttggccaagctggtcttgaactcctgacctcaggtgatccacccgcctcagcctcctgaagtgctgggattacaggcatgagccaccgtgcttagccacacatttcccatattcttgatcctctctgagaactatctcctaatacctcttcactttgactttctgcttgtctctcacagaggagagagactggcctccctcctgttcagtgaggaggaatggtctctgggatctgcaggtagctatatttgggaggcaggacctgacagggaactgagatgtggctggtcccacagagcaaaaggtcagtgagcctctgattggctggcagattgataatatttaataatagaaataattttaaaagaaagtgtaattaccaataataagaaaattactgataataatagtgaccctttaatgaatagccattgtattggagttcctagtctgagcactttacatacattaccttacttaattcccgcagtatttacatgaaacaaaaacaggctcagagcaaatgccagagacatctaaggtcacatgggctgggaggacagctcaggcctgtctggttctcaaatccatgccctttcttcttcaccaaaccatttttttactaaccagcaactatttgccagtttgtagagaaatgcagtgttccactgatccatctagtccttcaccggtaccaagtggttttaattactgcaatgctatggttaaaaatctgttttaatagctgataggaccactcccaccttactcctctttgttttagatgtttctgtttcgtcttttgtgtttgtttttttgaagaattttagttaattattttagtatggtccccacaaatcctgttggtattttgattgagattatatggcatttatagattattttaatggataaatgatatttttaaattgttgggtatgccaatccaaacataaatgtctttccatttattcagcttttgttatatcttttagtatatttaatttttttcttacaagtcttacataattcttgtcacgtttatccctaagtatttagggatataaaattgtttttattatgaaagaagcctatctttcattgtatttcctaacttgctatttgtctagaaggaagctgatgattttttgttaccaattttgtaattatctgcctcactgaattctaagttcctctagtagattctcttttgattctctagggtattctaggtataccatcaaatcttctgcagataatgacaattttgccttctttttctatataattatttggctaatacatctagaacagtgaaaggtaatagtggtgttggtgggtgtcttagttcattttctgctgctagaatagaattccaaagactgggtaatttataaagacagaagtttatttgtctcacagttctggaggttgggaagtccaagagcatggcattggcatccggcgagggtcatcccatggtagaaggtggaagcgagcacatgaaaaagagaccagatggggccagacatccttttatcaggaggcccctcccaagatactaacccactcctatagtaacagcattaacatatttctgagcatggacccctcaggacttcttacctcttaaaggtcccatctcttaatactgttacaatggcaattaaatatcgacatgagttttagtgggacatttaaaccatagtaatgggataatatgactttttttttttttttttgagacggagtttcgctctgtcgcccaggctggagtgcagtggcgcgatctcgactcactgcaagctctgcctcctgggttcacgccattctcctgcctcagcctcccgtgtagctgggactacaggcgcatgccaccatgcccggctaatttttgtgataatatgacttttaatgactaaataatatgtcaccattttgttataccataatccaattaatgtcctttattttgtatgtatagattgcttataagtaatattgcaaggaatgctcttatttatacatttaccacccatgttatttatatccatgtggtagattgttaggagtaaaaatgatgagtcaaggaataaaactgtttttgacattgctgatgctgaatgccatctgatttctcagaaaagatttctttgttaaccaaagtgtatacttcaaagcttcagatgttggttagtgccttgcagaatcttaggatagtgaggggatttccttagaagggaatttttgtggtgtgagcttgtacgttagtcttgttgggaaggtgttttattgtgagcttagatttagataagaacaagacatcgtggcaccagaatgtgctggtactgaggccatcccccctaacctgaggtcagtcaaacagagcctctgtttacttctttctgagaatccccttccattagggactgttataaaccatgcaaccatcagacacatgccctagtatggtcttgactggtcttgtccaagcccaaaaagccacagttttgtgatagtggctgtcatcagccatacagcagccatgtggcctcttcctctggctccccatggctctgccctctgtgctgactttgcacaagtgtctcactctcactcattctctctcattgttctctggtggtcaacccaactgccctgtagtgagctgctgggctgtgccctattcttccctggcagctcttatcttctcttgcagaaaatagacagaagtgttatgagttgattgtgtcccccacaaattcatatgttgatgtcctaaccccagcacctcagaaagtgacctcattgggaaatgaggtcattgcagatgtaataagttaagatgaggtcatcagggtgggcctgaatctgctgtgactggtatccttatggaaaggggaaatttggacatagacatgcacacaagaagaacgccctgtgagcatgaatgcagagaccagggagatacatctataagccaaggaaagtcaaagattgccggtaaaccaccggaagctaggggagaagcatgcatggaacagattctctctcacactcctcagaagaaaccaaccctgtagacaccttgatcttgggcttccagcctccagaactgtgaggcaataaatttctgtgaagttacacagtccatggcactttgttacggcagccccaggaaactgatacacagggttagggtgcatcttctcagccagtgtgaagcaaaggttcttcactgctgaggaatgacttgtcatggtggcttgaacaggtgaggccaagggtggagaggcggcaggaggggagaggagagagagcctgtggagtgggtaccctgagtcctggggtgtggtagccctcggtatgggcaggggcctagggagagaagggagggtgccctggtacccacattgtagccctctggtgaatgcttgttttataaactcaacaaagggtccctgtgaagtggttggaggccccttttccagtgcccaagacagatagctgcccctctggtagcggggatgcatgatggccaagaagggaatggaaactcccagacagcagagggctgggtccccctgacacctgcagctctgtgagtatggaaggatgtggtacgagttgtcatgggtgaatggcactggcccaaaaaatgccacctggaccttctgaggctggcagtgaaggagccccccgaggagaatggtgggtggagcttagagcccaactcttgtccccttggacactgccacagctctcaccaggttgacactgccatgctttagtgacctggccagagtgatctgagggcccacgctttgcacctcccctcagcatcgcactaaggctgggaggtcaggagagacagacctggcaggaccaggggctgggaaccttctttccatgatagcacttttgtcttcagcctggggacacctgccaggtggcccctgcccacctcctcgctctgcagctggggcagagacttaggagtccagctaccagggggagagcccagctctgccccaagctagttctggaaccatgactgagttactcaacctcttcaagcctctgtcttcccatctgtaaaatggagacaataatccccgcctcgcaaagttctcctaaggattaaataatagaatgggtataaactgcccaggacggtgctggcacacagtggtgatcaccatcagatggctcttattattacctgtgtaatattccccaaatcatggacacctaaattctttcccacgtattaatgtttttaccttcccttaagctaaacaactgacagcacactaaatagaagatgcaccgataacgtgttgcacatcttaaactagtcataataggttctgcactattcgtttccacgcaccagcccttgctcactggagacttgtaggtttccctgaagcatttagagagatgcttgtaaagtcatcatgcttccctgaaggcagtactccttctcaagggccctttcctccaggaatgctcctctagccccacatttcgtgcctttccagttgtgcagtggattctcacataaatcaccaaaagttctaatagtttgtttattcatgctttcattgattcattcattccttcatctaagactaggaattactcaagcaataaaggtgtatccaggcagaaagagcaagaaatcggagttatgagagggctcggggtctggggcagctcagtgtggatagagctggagtgaagggtgtagtcacttagtaactgagtaatatatacagagcaggtactgtggccaggccctgtgctaggtactgaagataaggcagcgaacaggcagccagggatcctaccccatggaacgtacaacttagcaaggaaaacatacaaccgattacagaaattagcctgtggttactagtgtgcagggtggcatgtcgggaaggtagatggtcctgggagagtgtatgagtggggcctggtctgtcttgagagccagagaaggccaatctaaggaacctctaagcttagaggaggaattaacaagtgaggtgcctgtttgggggtgagggatgaagaaaaaggtattctaggcagcagcagcagcatgtgcaaaggccctgtggcaagagggaggctggcacaatttaagaactcaggtggcaggtgacatgcagggagcatggcaggaaaaaaagctggagaggcaggcagggtctcacagaggataaaggaaccaagcaggaacagaaactttgtatatatgaaaattttcagtaaggataagttggggtgtgggcaaaattgcagacttactaacaggtaagtggcccctttgagatgcctggaggtcaatgcggttgctcaaagaaagcatggccaagagaacactgcctggcagaactcctcaagccctagggcagccaagcctgcccatgaggaagaggccacatctctgcctctacctcacacttggactccaggactcccctctattcccagaccctaaaagaggatttcctgcagcccaaaccagatacggtcacttacaaaaaaaggaatggctcccaagtggccgcgcctgtcctgggtgctgcataaagctgtttgatgtctctgttttcccaatacctgattgttaacaacagggctttaggaatcccagtggcaaaggggcagcctctgaagacagcagcctacactggcctggagccatgtccccctctgagctggctccatttgcagacctagcatgccctttcaaggcacaattaattctaaagcaggagctgataacagtgaaccctggggtaggccacatcccccaaggcaagtcaactaggacttgttactgagctactccaggtcaggcacagtgtggacacagaggggccccacgacagggagcaaagagcttcccatccagctcactcatcaacccaaggaaatggcagcatcggaacagcacacacttttggtgccctcagctgtacacaatcctgaccctgaaaatgaatggaaaagactcagttggtgcctgggaaggaatcagcttctgtcctgaagtatattaaagaaaggtcttctcaggtgctacttgcttgcagttcatttatacctccctggttacctgcctcccattccctccgcacaacaaaccacaaatgagaatgtagggtaggtaaggccagagacaggcacaccagccgcaaccctccaacagcgaactgcctacccacatgagggacacagaacagccacagcaaacaagaactcttaaagtgcagctgtccggagccattcagcaaaggggcatgaggcccagccctcaggagccaggcagagcaaggttgtagtaccaaaaatgaccttttttttttttttccttctaattctgaatcctccagaatggattcagttatgtttagggtgattagttcaagatcagggaataatgagtcttagaaaaattcccacccaaagagatcatgctcaaagtaggttcgtcacttaaaaggaccattgatccgacaaattcactcatgttgagaaagctttccccaacagtttccaataaatgaggtgtcagtgaaatgatctcagcagtgaaataaataataccagcattaaactataaagcagcccctagaagggtgtgattatctagtgaggggtacagacaaggagtgcctgcaggtccctgcgggtgcagaatgacagagggactgggccgagaggaggaccttgtgcagcattgaaatggggcaggaatgggctggagggagagggcaggggaaaagcactccaggcagtgggagtggcaggagcaaaggcaaggggctggaatgtgcttcatttcttggggaaggggaagaaagtacatgagactggcaagagggaagtttgtgggtagattccttgaggagagcctgctggggccagactgtgacctggacacgctgcagacacctcccaggtggctgccactgaccagccacagaagcttctttgagggcctcccagacacacccccaaggatctcctctgcatggcagatggctggggttgtttttggcagcttagattctggaagtctgtgggaggagatggccaggcgggaatgaaaggctgccagacctcgtgacctgcacacaggtggccggtgtcaggcaggcagtggtgtctgcagactttgctgcccagacctgggcagggcctgccagggcgtcctgggagccagcacaggctgcgcggccggcccatcacaagtgagcctttgtggccccggtttacgaaaccagccaaatattttccttgtcactttatgaggtgctaggtctacccattcaagctgggaaaaataaagcgtcacagaatttgcgccgttagagttgaggaggtttgaagtgaaccaatgctccttttaaaagaattctgtgcccctgggaaggcctgtcagcctgaggggtaggagtacacccaagatcccacctctggaagggatgggtaccatccaagccgcctgcaggttttacagacgtagagaatgaggccctgagtctggaaagtcttcagcccacaaggcggatggagtcagatgaatgaggagactgagttccttaaatatctttagcaccatacattcaggaaccattttagcctctttttcacaggtgaggccagaaaggctcacagaaaagggtggatgggaattctccttcagaacttcactgcaaggcagaaaggattccagaagggctttgaggctgaggtgcgtggtgaaacgggatgttacacactgaagttgaaaagcatccgccttgtgcagtaagccagtgggcagtcaccattgcgctgattcctggcctcccactgagttcccacatcccctacaaagccccatttcttactgcccatggcctataatttcattggtagatctgcttcccttttgcctctagtaataagtttcatttattgggtacttgctatattatgccaagcattccactaggtacctcattcattcatttaactgagatttatcaaacacctactatatgctgccccccgaggatgcagcagccctgtctggcgtagtattgaatccattgttacagatggatcatttgagctcaaagagaagtgacttgccgaagacatacagctaatacacggcagagttgaatttcaaagccaggcgggtctgacttcaaggtatggcttctctccactccctcattgacagggttaggaagaggcaagtaattaataaagaagacacaatgtaagtaatcataattcttttctttgccttcaaagttataataaaatagattaaagttttaaatgcttactacgttttttaaaaaaatttcttttccatctccctttcctggtaaactgcttattatcttttagatgaaataaagatacactttcataaaagagaatccgtgatggccacttaaaattccacactacatgtggtaactacatcgccacctggtggtacagattttgcataacgggatgtaaatcaagagcaaagacaacagctatgggccattggaagggactacaatttggaagtgagaattcagaggttctagtctgtgctctgccctagactggccgtggtggcactgagtcagccactccagccctctaggtggcagatcctttttttgcagctcctgtgtgggctggtgtccctggagactccgttttaacttggacattccctctttattgtcctcctatgttgcactgaactcaaagaaaaatgctcaggtgggttttgaggtaccagttggggagatagtgtggggcaaggctttctggagccctcgggccactccatgaaggcagcacctcctcctctaagtgtgcaccttggcctggcctcaggtatcccattatggcttttcaccctccctgggatctgctctgactgcagtcctcttaagggcagttctcaccccatgcctttctcaccagaccagagaccctctaccacaccctagggtatccatcaggaattacctccgatcagagttcaagaaaccaagttcagggtctaggatgggcttagcacagcagaagtagtttgttagttgtattcttttataaggaacagaagacctgaccccaaactgccttaagttaataaaaggaatatatgtgcttttgtcactgagtaattgtagttgctttagcctcacctgtaatcccaggttcaaacaccattggcagggtctgacgtctctctctccatttctcagctcttcttccttcgtgtctagtggcaccttaggggtgtcttatggggctttaggccccacaccctcaacctacctgaaataacaggatctaagcagacagtgtttcctagatctcccatctcacagaccaccactcctgagcccctcctacatacacattctagaggcctctgtatggggtcatctttctcaggtccccaaatgacttcaaggaggccctgggtccacctgttgctccttcttattgcaggccatgcccagcacaagtcctggaatccactctcatgggccccactgggatctcaggctcacccctgaaccagtcagtcacagtggccactggactggaatgtgctgattggctcagcctggtcagaggctccacgcctggggttgggatggggcaaagcctcaggaaaaacacactccccaagggatctgaaatgttttacctaaagggcaggtgacggatgctggaggcaaaaccatcagaaatccattagtaattaacataaaagttagtagaatggaagttcatacattatttatcttttgagtaaatcagagtgataagactatcttaatggtaatgtcgcttcattcactggaaaggtgtgttcataggaatgcaaaaggcttaggaaaaaaataaataagacgagaagagtctgttcagcgacagagaaaacagagttgggcctggcctctgtcctgtccccactatgtgtccatccagggcaaggacagtattggtgaagacatgtttcaacaatgccttcaactcagccctgaagaagaaaggtagtcccttaggtttctgagtttccttctgggagtctgtcttgcatgtgaatatcatcctgtaactattgggacagccttacatcccctctgctagtctctaaaattgacttgaagatttttatttgtgcccaggcacagtggctcaggcctgtaatcccagcactttgggaggccaagacaggtggatcacctgaggttaggagttcaagaccagcctgggcaacatggtgaacttttctctactaaaagtacaaaaattagccaggcatggtggctcaagcctgtaatcccagctacttgggaggctgaggcacgaacatcacttgaacgcaggaggtggaggttgcagtgaaccgagatcacaccactgcactccagcctgggcaacagagcgagactctgtcttaaaaaaaaaaataaaataaaagatttttatttgtctgcggtggcctctttcgctgttctgtcctgcttgggctaatgtttaaaattccagatagagtgtccaagtgggcagggccttagggactctggtgcaagccccttctgctgtgaatgggggccagcgagggtcagagtcttactgaattcacagagctagttaaatcaccgagctcaggagcctctgcctggcaaccccttctcgtgggagtctcgttaccacagggttcccaagcaggcagacagagaggcagccaaggtgaaggccccgatgacacctttgctatgaataacccacaaaatcaattactgcagtgggcagagcagcagccaggcccttcactgtgtgctgctgggcgcatgtactgagatcacttcttgctgcagggcttcccttcctaattgtattttgctcaaactaatgttaaaaattaactttcccagcattcagatgaggccaaagcaggaggtggaataagagaaaagacttaatttttagtggatagaccaccagggagccacctgggatagatgttctgtgtgtgtttgatctctcagagatggagaacatttactgagcagcattctgtgctaggtcctggggtactccctaggatcagaccgaggccatgcctcaaagagcccctagtttatcgggtagccacacaagtaacaatagtgatagttcagtgagatgagcattaataaagggctctgggtagtgcaggaggcgtggaggagagagagaatatcaggtgtttgggtcagctgtggcatcgaggaagtgcagacagaggaggaatatttgagttgagatttaaagactcaagtatccctttccctagatggagaagaccgaaagcagcatttcaggggagggcacagcatgtgtgaaggcacagcggctttaaattgcacagcagcactcaggaggttgtgagaagtccaaggtgcatacgaggaagagagcagtcagcaaagagaccagatcatggagggtgaccccaccgctctaactggtatttattcattcatcaaaacctgggccttttggagtccagttttttaaatttagattttacttattttgaatacatttataaggttttattaaaacatgacagtgatcagtcttcttcccacccctgttttcagccaccctccccagaggcaaccgatgctgtcagattcttgtgtattctaaggtgtttcccacaaatacacaaacagcagcagtccactcacaccttgccatgcaccttgcttccatcacttcatatatcttggaggtgattcagcacatggagcttccgccttctccttgacaatggtgggagctcagttgttagtcctagcttagagaccttctcattccacccctcatcttacagtggaaaggcccagagaaggtggggagcagctccagctcacctgctgttcagggactgagccaggcctgaaactcactcctctgcctcccatacccaccctgggccagccagatccacttccttgccagcggtcctcatttgctagcccatcagctgggtgaggctgccatttttcatagccattacaggcagagaagctggtgtttccatcggcctcgtgatgtggattttagacttccacagtaatctttatcattgttttctcactttccctttctctcccctcttcctcctcctcttcctccccatcttacatctcagcagccttgtatcaagcctctgccccaccctggtcccagcaactggtcaccatggcaacaagggccttccatcaaaaagcggccttccaggtattttattttgagccccaattaagcagggcaggtcacaggctgggagcagtgcagagaagagtgttttacggcctgtgagagagcccaggtgctatttatagctccttaatcggtgttgctaaatgggtcttaactcacgtcctgtggcaactgcacattttcatcgcagagaatctccgccccacagcctcactccctccatctgttggcctgagggagaaatggtgcctcctctgtgctcagcagctgtcaggccacttgacccttctgacctcctcctgacactctctggccctttgcagccctgcctttggggatatttggtccacagcggatgcttctttcaggaacccagaggcctcagccctgtcccagggctggagttctgtccccaacctcccaccacctcttctcagcctccccatcaaagccagagtggtaagagggacatgtaagacaatatatccaggtttttgtggatactccaaaaattctttccattaacatctcataggttaactagcattttcaatcattaaaacagagcaagttaacagcttcttacagttggggaaatagaggctgagaatgggagagggaattaacagatacccattgccacatactgccttggagctttatatgtaccatctcattcaatcttcacacaacttgttttatagagaaggaaactataccagtcaggatagcccaggttttgctgctgtaacagacaatccccaaacctcactgacttcaaacaacaaaggtttgtttttgcccatattgtgtgctcattgctgttcagcaggaggctttattccacaaagtgtgtcctcactttgggtccagggcagaaggaacagcccctaatggtgactaatggaaaagtgaaggcagcaaaattcacactggctcctaaagtttccaagcaaaagtaacacacatcacttctgctgccatttccttagcaagtcttatggccacacctaacttcaagtgagtagggaaggataagctgatcattgctcagagggcaagagccagaatatttgagaacaaccacattgacctccacagaagctgagagtcccagaggtgaagtgatttgcccagatcccacggctccaaagtggcagagcagggatttgaactgtcagctgtttcccccagaaacctgtgcatgtaacaaagtggttatagacttgggctctaacgtcatacttctggcttgaactctatctccagtattcaccagctatgttatcctaattaggcaagtcatttaacctctcagagcctcatttatttgttaaatgaagacactagtgcaggactatgttctgaaaaccaaaacttttttcataagtttggggcaaactcatttggcagccagactcaacttgaactgggtgagactatttatatcactccttatttcacttggcgtgaatattcataggtttcactgtagaaatattaaagtgtttggttgcagtccgctggggatgttataccatacatagcatatgcaacctaattactaaaccctggaacttgctttttttttttttttttttttttttttggtaagggacaatggtcctgtagtacttccctcatggggtcatcataaggattaagggaaatgatttgtcaaaaattctgagcacagggcccagcacatagtgagcgctccatgcttggtggttatttttggtccctagattgaactgttgaggcaggaagaggcctgggctgcgagaaactgccatgcaagctgaaaccacagcaagaaaagagtgggaacactccagtttgcacagaacccacatcagcgggtctctcagtttcctgagtgttccgtcctaggaaacaggttctttagggccccattaatcctctagggtgtttttggaatgattcactctgagagcaaatggagtgtttgggtcctcggaaaaagacaaagtgctttgtaagtatacggtattgttttcacacttattaaatgtgatgtgccccttccatcgggcaagagtctagggctttgccatattcatttctcaggatcgtggaacccaaaacctgttcctcagaagacctcaaagccctgccttatggttagaacctgagaccccaccctccactctgagcagcttcccgtctctccgctaaatagactggagttctgcataaatttcatttggcaaagggttctgctgtttggagaaaacccgcccttctcctcccagctggagaactgcagcccagggaggcaccatgcgtgtcagtcagaacctgggctaggactgtggtgggatccccactgatcactcactggctccaagatgcccttaggcaggtggtgacccccctgtgatccactttcctcatctgtaaatgaagatgccaagggttgttatgaggattaaatgagctaatttatggaaagttcttagaacagtgcctggtacagtagacacactagtgatgctggctattaatattttctcacagcaagtttgtggtagagccagtacctgggccttctatcaaaagacagaaggaggccgggcgcggtggctcacgcctgtaatcccagcactttgggaggccgaggcgggcggatcacgaggtcaggagatcgagaccatcccggctaaaacggtgaaaccccgtctctactaaaaatacaaaaaattagccgggcgtagtggcgggcgcctgtagtcccagctacttgggaggctgaggcaggagaatggcgtgaacccgggaggcggagcttgcagtgagccgagatcccgccactgcactccagcctgggcgacagagcgagactccgtctcaaaaaaaaaaaaaaaaaaaaaaaaagacagaaggaatcttgttcaactaaattcatggattttccctctgcctgctgactgggctgtcccatcataaccctagatgggttattgggtgccagaccttgctcctctcagtcctcggagtggccaggcaaggcatggggcagcagagcccatggacggaccacttctggcctcaaggagctttccagggcctctcagcaagtggcccaagtagaggggttctgacaggggcctctgaggcccctttaggtagctaggacaatgggcaaatgaattgtttgaccatgtcttggacagatgcctggacagagcccctccaggttaccccagctgttctcccatcttctttgtatctcatgctgagcaaaaggtcaggaagcagtgctttaaattcagcacaaggatccaaaccacagtgagatgccacttcatacccactaggatggttataattaaaaagcaaacaagcagaacagaaaataacaaatggggaagatttggaggaattcctggtgagaatgtaaaacgatgcagctgctgtggaaaacagtttggcagttcctcaaaaagttaaacatagaatcaccatatgacccagcaattccattcttaggtatatacagaagaggaatgaaaacaggtaggtattcaaacaaatacttatgcatgaatatagcagcaccattcacaacagccaaaaggtgcaaacagcccaaaatgtccaccagtggatgaatgggcaaataaaatgtggcatattgatataatggaatattatttagccataaaaaggaatgacattcggatacatgctacaacatcaatgaactttgaaaacattgtgctaagtgaaagaaacctgatacaaaaggtctcattatatgattccatacaatcatataatattccatattcatattctgggcatggaatatccagaataggtaaattcatagagacagagggtagattagtggtttccagggtctggggaatggaggatgggacatgactgcttaatgggcacagggtttcctttggaagtgataaaaatggtttggaacttgacagaagtgactgttgaataacactgtgaatgtattaaatgccactgaattgtatactttaaaatggttaattttggccgagcgtggtggctcacgactgtaatctcagcattttgggaggccaaggcgggcagatcgcttgagtccaggagtttgagaccagcctggtcaacatggggaaaccccatctctacaaaaaattagccagacatggtggcgcatgcctgtggtcctggctacttgagaggctgaggtgggaggattccttgggctcagaaatttgaggttacagtgagttaagatcacaccactgcactctagcctgagtgacagagtaagactctgtctcaaaaacataaaataaatgattaatttcatgttatgtaaacttcacctcaatttaaaaattataaataaattcagtgcaagaagttgccaccagaattcagtcaacaggtcagctgtgttcatgtggaaaataccaggggtgaattcagtcaatcgccctgagcatggccctgggggagcacccttcattccccatgaccccaggaaagtgtgctctcctccagctgagggtatctcactcatttccagctcccctgcagctgacctggcacgtgacaaatccttaagagctttggaactaactcctatgggtaattgacgaaacacggtgaatgcgcaggtgcctgtcctctactcaccggctctgcaatattgtgctagaagcttaatctcagcacttggttttcctcactgtgaagtaacatgggaaaatgaggccgagtctagacccactgtgctggcccagcaagcaaccagatgcatctaaaccaccgtggccagcctgggcacactggcagggctctgcagagggcagctgcgctggtcttaggtgattatcattgttatccacggtcaagggcatctcagtctgtggtcttttgagaaactgcttttgccactatctgaactaaggtatttttctgccttttcccaattcaaaaaaagttcattttctctatcatttttctctaccaatatgtttttgtccataaacctctaatgtctgctaccccttgtctacggtaaaataagaaaggaagtgtctgtttttatggaaaaagtagacattgtaggcattgtacattaaatatgtgaatgttctgggcgttgaccagtgtcttgtggggaacgcaagagtcttgtgagcccagcagccctgccaatgttgcctgcatgaccttggaaatcacgtgacctctctgtgcctgagttccttcatagggtgtgaggaggactgagtaagctactgtaggtcaagtgctcagccggcatcagcgcaaagtgaacttcccaatctggacactcagacactaaatggggtttaaaagcagttctggttttttacgtagttacggacatcatagctagagttggttgaggtatggaagaacaatgatcagattcctggatccaactgcgtttgggcctctgtggttggatccgatctctggcagcttactgagggaccagctgtccccagtggcgttggcaggtactgacatccctaacggtggtggatgagctttattctgcgatagaagtgacactgtcagctcagtgctggatctgggcctagaaatattttgtttggccatactaaattaaaacaacacagaaatgtcacataaaaacctgaattttggagttttctggaaaaagcaggaaatgccccctgcccatagcttacacctgctccccactattcagttaggttacctgcctggcaccatggatgccggagtttgcagcctttgatctaaattgcaaatgtatttgtggtacttgagatagttttcattaatgcactgatcattagctttttaaaaatttatctaaaacaaaaaatcatttgccttgaaactagaagcggaagtaaagtagctgtttttaaatttgccaactattattttgtatcatggctgtttataaactgaaaacatttatttcagacttcatcatttaccacttcttcttagacacaattttcctcttctggagtatctcataaatactgggttcctcttgggcctaattggatcatttgactaaaggaggaggggagcttgagtgagaaaactgggcagactccatccaagaattcagtttactcatcagttttacttaacttaagaaaaacaagcttccaccatcctcctctgggcctgtttctgagctcacacttggaaaggtcaaataaacacaataaatccattagaaggccttcatattaagcccctggggtttatactatttagcaagaggctaagagatgacgtttcccaagtagaggaagtttgctcaagcatagctgtttgctagaaaacaggagtcaactgtgccagttagtctcagtggttgtgaggagcacagccccaggctgcttcaggaagggggcttgatggtggtcgttctggtggctgggtctggaggggagaagacccccttgtggagtccatgtcagctccctttccctttccaaattcttcaggccaaatcccagttggaattaggtggattgaacccgttagttgctgccccccactaggcagggtccctcactctggctgagcttggaaaaccagctggcaccaccacatggagcagggctgagggtcagggccatggggcccttgggactcaggaacagaactgatagggttggtgaagaggtttcctttgcagtgaccatcatcccacttcttcatgggagttggcagcagagagtgcatcccagaccatgttgccccagttccaatcccatactcaccacttaactgtgaccttgagcaagtgcctatcctctcaactgcctccatttcctccagtctgtagctggccattcataatagtaactacctcattgggttgttatgaggattaaatacagtaagacaaagaaagtgcttagaatgtctcatgacataggaagtactatgtaagctacaacttactacaactataatgttactattattattgccaaaaaaatcagttgaagagtccagtaagagcactcagatgggctttgaaaatatgtcaacactcatgagttcccaaggcctctgcttctgatgagaagattggaaagaggatcctgaagagtggagcaggctgatgggtgtggcagaagccacaggtcacacagagctggctctgagccccagatctgagccccagctcacagatgcattagatgctgtgtcctgagcaggactctgtgtggaattatctgtggttattgatgtagaagcatcctacctggatgtccagtcctcagctccctacaccagccgcctatttttcaccttgtcccgaagaacactaacttctctgaaatattaataatagctgtcattgattgattgcccacaaaggacagggcctatgctgggtacctggactctgtcccttttctaatcctcccagcactccccacgaggcaggtgatgttcccattttacagaggaagcagcctgccctgtaaagccagaacctgactctaggtcttctaagtccaggcctgggctgctgtttccttccagctctgcctttgcccaaccacgctaagttccaagcaggcaagagtgactccattattactccttagctagaatttataattcatcttctggccaagctctttgagtttggttggggccacctagtaactttctcattcaattttgttctctttctctgtttttatttttatttttaagttctagggcacatgtgtacaatgtgcaggtttgttacataggtatatatgtgccatgttggtttgctgcacccatcaactcatcatctacattaggtatttctcctaatgctatccctcctatagcccccatcccccgcccaacaggccctggtgtgtgatgttccctgccctgtgtccatgtgttctcattgttcaactcccacttatgagtgagaacatacagtgtttggttttctgtccttgtgatagtttgctgagaatgatagtttcccacttcatccatgtccctgcaaaggacattaactcatccttttttatggctgcatagtattccatggtgtatatgtgccatatgttcttaatccagtctatcattgttgaacatttggattggttccaagtctttgctattgtggatagtgctgcaataaacatacgtgtgcatgtgtctttattgtagcatgatttataaccctttgggtatatacccagtaatgggattgctgggtcaaatggtatttctggttctagatccttgaggaatcgccacactgccttccacaatggttgaactaatttacactcccaccaatggtacaaaagcattcctatttctccacatcctctccagcacctgtctttttaatgattgccattctaactggcatgagatggtatctcattgtggttttgatttgcatttctctgatcaccagtgatgatgagcattttttcatatgtctgttggctgcataaatgtcttctttggagaagtgtctctttatagcctttgcctaatttttgatggggttgtttttttcatgtaaatttgtttaagttctttgtagattctggatattagccctttgttagatgagtagattgcaaacattttctcccattctgtaggttgcctgttcactctgatgataggttcttttgctgtgcagaagctctttagtttaattagacgccatttgtctattttggcttttgttgccattgcttttggtgttttagtcatgaagtctttgctcatgcctatgtcctgaatggtattgcctaggttttcttctagggtttttatggttttagttcttacatttaggtctttaatccatcttgagttaatttttgtataaagtgtaaggaagggatccagtttcagctttctacatatggctagccagtttttccagcactacttattatatagggaatcctttcctcattgcttgtttttgtcaggtttgtcaaagatcagatggttgtagatgtgtagtgttatttctgagtcctctgttctgttccattgatctatatatctgttttggtaccagtaccatgctgttttggttatgtagccttgtagtatagtttgaagtcaggtagcttgatgccttcagctttgttctttttgcttaggattgtcttggctatatgggctcttttttggttccatatgaactttaaagtagctttttccaattatgtgaagaaagtcattggcagcttgatggggatggcattgaatctataaattaccttgggcagtatgactgttttcacaatattgactcttcctatccatgagtatggaatgttcttccatttgtttgtgtcctcttttatttcattgagcagtggtttgtagttctccttgaagaggtccttcacatcccttgtaagttggattcctaggtattttattctctttgtagtaattgtgaatgggagttcactcatgatttggctctctgtttgtctgttgttggtgtatgggaatgcttctgatttttgcacattgattttgtatcctgagactttgctgaagtttcttatcagcttaaggagattttgggctgaaacaatggggttttccacatgtacaatcatgtcttctgcaaacacagacaatttgatttcctcttttcctaattgaataccctttatttctttctcttgcctgattgccctggccagaacttccaacaatatgttgaataggagtgatgagagagggcatccctgtcttgtgccggttttcaaagggaatgcttccagtttttgcccattcagtatgatattagctgtgggtttgtcataaatagctcttattatttatccaggaatttatccatttcttctagattttctagtttatttgtgtagaggtgtttatagtattctctgatgtattattgtatttctgtgggatcagtggtgatatcccctttatcattttttattgcatctatttgattcttctctcatttcttctttattagttttgctagcagtctatgtattttgttgattttttcaaaaaaccagctcctggattcattgattttttttgaagtgtttttttgtgtctctatctccttcagttctgctctgatcttagttatttcttgccttctgctagcttttgaatttggttgctcttgcctctctagttcttttcattgtgatgttagggtgtcgattttaggtctttcctgcttcctcttgtgggcatttagtgctataaattttcctctacacactgctttaaatgtgtcccagagattctggtacattctgtctttgttctcattggtttcaaagaacttatttatttctgccttcatttcatttatttacctattagtcattcaggagcaggttgttcagtttccatgtagttttggggttttgagtgagtttcttaatcctgagttcaaatttgattgcactgtggtctgagagacagtttgttgtgatttctgttcttttgcatttgctgaggagtgttttacttccaagtatgtggtcaattttagaataagtgtgatgtggtgctgagaagaatgtttattctgttgatttggggtgaagagttctatagatgtctattaggtccacttggtccagagttcaagtcctggatatccttgttaaccttctgtcttgctgatctgtctaatattgacagtggggtgttaaagtctcccattattattgtgtgggagtctaagtctctttgtagatctctaaggacttcctttatgaatctgtgtgctcctgtattgggtgcatttatatttaggatagttagttcttcttgttgaatcgatccctttaccattatgtaatggccttctttgtctcttttgatctttgttggtttaaagtctgttttatcagagactaggattgcgacccctgcctttttttgttttccatttgcttggtagatcttcctccatccctttattttgagcctatgtgtgtctctgcacgtgagatgggtttcctgaacacagcacactgatgggtcttgactctttatccaatttgccagtctgtgccttttaattggagcatttagcccatttacatttaaggttagtattgttatgtgtgaatgtgatcctgtcattatgatgttagctggctattttgctcgttagttgatgcattttcttcctagcttcgatgctctttacaacttggcatgtttttgcagtggctggtacaagttgttcccttccatgtttagtgcttccttcaggagctcttttagggcaggcctggtggtaacaaaatctctcagcatttgcttgtctgtgaagtattttatttctccttcacttatgaagcttagtttggctggatatgaaattctgggttgaaaattcttttctttaagaatgttgaatattgcccctcagtctcctctggcttgtaggtttttggccaagagattcgctgttagtctgatgggcttccctttgtgagtaccctgacctttctctctggctgcccttaacattttttccttcatttcaaccttggtgaatctgacagttatgtgtcttggggttgctcttctcaaggagtatctttgtggtattctctgtatttcctgaatttgaatgttggcctgccttgctaggttggggaagttctcctggataataccctgaagagtgttttctaacttggatccattctccccatcactttcaggaataccaatcaaacatagatgtggtcttttcacatagttccacatttcttggaggctttgttcatttcttttcactctttttgctctaatcttgtcttctcgctttatttcattcatttgatcttcaatcactgatgtcctttcttccacttgattgaatcggttattgaagcttgtgcatgtgtcacaaagttcttgtgctgtggttttcagctccatcaggtcatttaaggtcatctctacactgtttattctagttagccatttgtctaacctttcttcaaggtttttagcttccttgcaattggttagaacacgctcctttagctcggagaagtttgttattaccgaccttctgaagcctacttctgtcaacttgtcaaactcattctccgtctagttttgttcctttgctggcgaggatctgcaatcctttagaggagaagagacgctctggtttttggaattttcagcttttctgctctggtttctccccctctttgtggttttatctacgtttggtttttgatgttggtgacctacagatggggttttggtgtggatgtgctttttgttgatattgatgctattcctttcggtttgttagttttccttctaacagttgggcctctcagatgcaggtcttttggaatttgctggaggtctactccagaccctgtttgcctgggtatcaccagcagaggctgcagaacagcaaatattgctgcctgattctttctctgggagcttcgtcccagaggggtacctgcctgtatgaggtgtctgtcagcccttactgggaggtagctcccagtcaggctacacaggggtcagggacccacttgaggaggcagtctgttcattctcagagctcaaacaccatgctgggagaaccactgctctcttcagagctgtcagacagggacgtttaggtctgctgaagctgtctgctgccttttgttctgatatgccctgcccacagaggtggaatctacagcaaggcagcaggccttgctgagctgtggtgggctctgtcctatttgagcttcccagcctctttgtttacactgtgagcataaaaccgcctactcaagcttcagcaatggcggacaaccctccccttgccatgctgcagcatcgcaggtcaatctcagactgctacggtagcagtgagcaaggctccgtgggcgtgggacccgccaagccaggcacgggagggaatttcctggtctgcctgttgcaaagactgtgggaaaagcgcagtatttgggcaggagtgtaccgttcctccaggtatagactgtcacagcttcccttggctagaaaagggaaatcctccaacccttgtgcttctctggtgaggcgacgccccgtcctgcttccgcttgccctccatgggctgcacgcactgtccaaccagtccaaatgagatgaaccaggtacctcagttggaaatgcagaaatcacccatcttctgcatcagtcttgctgggagctgcagaccagagctgttcctatttggccatcttggaagccagacctaaatcctctctctctttttgtttttaactgaacttctgatatacagaattggattaaacataatccttagttgtaatacactgtcatctttggtcccatgcatagccctctttaattctaatttccttatttatgtatttacccctttataatttaatgcatacccatgaatctaccaccctacccagtgcctagaacattgataatcaagcacctctgtgccccttgtgttgtctccgccaatctgcacccttgctgaaaggcaaccactctcagaattttgtgcttattattcctttgctcttttccttatagattttttgtacacagatgtgtgcctcaataatgccttgtttcattttagttgttctgcaacttcctaaattacttactcctatgccagtaccactcaatgtcattgctacagtgttaagtaacctgatatctggtagacaagtcctgctgtccccaaattcctcattcctttttagaaggagatgccacggggaattggggacccattcctgaggacttcaccctgccctggatgaaattagcaccaactgtctctgcaagcacccttctgcttcccctgcctggtctctgatattggatgtgtttctttcagtacccataggggcagctgggttgttccagtgctgcagtgacagggaacactgcagaggttgggaagatccgtggagcagggtgcatgccaacccagaggcacccccacctgacactctccccatgtgacaagggctgtcccatccaaggccagcatgtccaaccattgtgcagctccctggggcaggttccaagttaaacacagtcagactttctgggacaattttaagctgagttaggagtatcctctaccagaccaaggaactggtgctgtgtgttactaattctgtctgcctgcaggaccttgccaggcttcttcagtggactcagggcaatatgaaagagctactttttattcattacctgcatcagaggacctgggctgcattttcctttgtagagatgcaggctcatttcagctgcctcctctctcccgaacactgggtttctcattctcattgacccagaacctacaatatccaaagcagagcggtaagggctggacagctaacacgagacccagccctgcctgtgggagcccataggggtgaggacagctccagcaacagggaacagttctacagagattcagggtggtcagggatttcctgaagtttgagggcagggagaccatatttcccaaaccccaaattaggacaatgaggtctggcagcaggacagaatatttcaaaccaggatcgtctcataaaactctcaggtttagtcaccgtaatgatgagaaccactcacaggcctctgcctaggagggtctgatgaggatgtggagaagggctcacagcagcaggtgtgagctgtgtttcatggggacagggaagggcaaggagacctagggaggctgcgttcataatggagtcaggaagatagaaaggatgggacaaagagatgtttaggacgtggacatgaaagcacttgggggtagattgggcttggagagcagaggagggacattgtgagtgtgtctgaagatctcagcctggtaacatggctacaaagacagggctcccactagagaagtacagcagtaaggaggaagggcagggaacttggtttcactgcggagagttgacatgtctatgaggccacagacagggcatgtggaccagtgtattagaatcactcagatcatgttaaaatgttgcttctgatgcagtaggtcagggtggagcacaagatcctgcattttcaacaggctcccaggtgacactggtgctgccagtccacagatcacgtagccaggctaacgagggtcccagacaagaatcgggcagagatcacatgtgacaatgtccctaatttggataaggagttaagtacatgttgaattgaggcatgtagtgtcatttttcatttccccccacaagaaaaatgtctcgacttccaggaaaaccattatcgatcaccctgattagaatccagggatgcaaaaatggaaggggagatgtgcctttatataatttttttcatatgaagaactgattcctctaactttcacaggtatgactttggttgtaagcagttgagcagagcgatatttttctttctgcctctttggaagtgaattttctgatgaggttagctccttctctccgtttcacccatgcgctcaccagcacaaggtggcagggtctgcaatcagacaggaagtggctggtgttgcagtaatattagagtcagggcagctctgtgccttcatcacatcatggcaggggaagaatcagaaggttcagaaccctgaagaccaggactcccatgcctcctcctcataatacctggactcaggtgttctcaggcatatccattagtatgaattgaagtcaacatgtgccccctgccaggggtcagtctcattctgagacctcagtctgcctgcagaaataagcagtgaatggatttcaggcatgggcccaaggttcagggggatgtatgtggttcctctgagaataaggaggctgtgtcctgcccagggttgtctctgcagacacctcctccctctgcttatattcagggaagggttgcaattcagctcctgcatattgggctcattttgaactttaatgacaccaaaaacaaaacagttgactttgtgacttggtttcctttgggagtttaaataaatattactatagaaatatcattctccttgtccaaggcttctcttctaagaggtgtgaagatagaggagaatcatattggatcctagcctttcctctatggcttgtggagattttgtgggaaggccagtcaaacatatgggtgccccacgcagacaggtttgaaagacctacctgagaagggggttctggttacatccttgccaccccaccaaatgctccccaagtctttggggctctatgattcaccacaagagagtgagccccagcatttcagaactgaccagatgcttagagaaaatctcattcagtggcctcagacaggaaagagaagctcagagagggaagaaatgtagcatcccaaggggttaatggaagaactgaggctcaaacccctgtctcctgaacccagtcacctctgcctccacctccctgccttccttggcctgaggagtggcattcactgcagcagcccaggtcccagccagcctttcatccctgaggccctgggctcaggagatctcagactcaatcctgaggagagaagacggagcagcctgttggaatggaagctgaccccaagtccacgtccacagagatcaaggctcctggatccgagtccagtcctctgtttttctcccactttccttcaatttccaaccggggttccaggcttgctaccaacatcccaagagtgatatttttcgaaggacaccatctgcccattgtatcaaccccagaggatcttcttccacagacccagggagaccaaataacaacagcaaaccaaatatcgatggcatctgagcatgtgccaggccatgctttaatcctttccgtaggttacctcctttaattcgcacaagcaccgtcagagacaggtccacgagctgagtttgctaggaccttggctgggataggacttgaattcctctgtgaaaatagagcccactccgaccccttccatggatagattagtagtggatctgcctctgcttttgatggtaagaggctagtgaaagattctggcttgggccttacactagggtggagactgagctaggattcgcctccaatacagccccccatgccccagcccgggctctcaaaggctgggcaagggatgggaccttcttccacctcttcactccccgcccaacccaaacacacagaggtttctccaaggtgtgtatgcttcgaggtcaagaagacccaacagtggtccaggacacaaaccccagtaggacctgagtctccagtgcctgcctgaagccagtcattcttcctcacagctgggagggggtcaatagtgaacacccatgtggctcagcagggctggggggtgcagcagcaagccagcagtggacaggcagctgagcactgctgaactgttggccaggaaggcagagacctgtggaaggaaggccaccagagaagggttcaggtctccagaccccttgttcttttgacagtgctagtgtgagcccatggctaaaatgagcctcacctgtaaagctgagtgaggcctcagttcagccagtcctgcctttgataataacagcagcttagagccagccctgcccttgggcctggttcagccccacctccccgaggaaacctgcctggcctctgtccagagctcagaagccacatccccaggtctgcaaggctcctctaacatttatctcacaggcatcacttgccttgccattcactttttcatgtgcattttttttttctatcaaatctaatttgatttggtacagtcaaggccctttcactgccaggattaaatgtgatttctgttctgccaaacgtcaaccggtggagaggagcctcagccatcacgccaagccatttgccactctgatggagacacaggctggagaaggaaggcgaggccactctgccagctggtggctgagacttgccaggcacccagggctcccagctgcctagctgcatggcaggtcagggaaaggaggacaaatattctcttaggccctgcagtagaactgaggtctaagaactgagaaccgaaccgaattccagaagctctttgttcccagttcatttcctagtccttagccctgcccctcccacagtccctcactggctgccccattggcctgcctgacctcatacccttggttcctgggaatagtgaattgttcaactggatgaggagggaggagaagaaaaagaaggctggtgggtggagcagatctgaagagacggccctgcggcctccaggtttccctgaggggaaataatggttaagtcggtggggaagggggtggagtgtggtaagtcattggtcagagactggggtgcagaaatgggtttaggagtaatgctgaggttgatagtggcccaggtaatagtggctggatggaggagagagtccctgaggatctggcagtcaagaatcaggagcctgagtgatgagaaagtgatccctgtggaggagtcatcagggcgtgacaggtgtgggtggagaggggctgtggggggccaggccaaagccctgacaaacactgggccagtggtcagtggatgacagcatcaaggagtggggagaggactgagccaagtggtgtagtggtgtgaaccacacaggaagggggatttctcacaaacagaaggtgggtgtggagctttgtatatggcagaggagccaggaggggccctgccctgcctccaggcctgagtgagcacgcagcccccagagaaggtggaagggcaacggggtgccggcacagaatgcttggtccagttgaggcagctggggggagctcacagaaggagctggggttgcagttttctgtatgtggagtggcagttccaaagggtgtagtggaagatttgagtggtagggaagctgagggctggagtcagaggtaagggggacagagcatcatggggggatggctctttagcaaagtcagcttctagaaagaggttctactaagcatcaggatccaacagaactttaaattgttccattctaccttccttcacttcagggtgtcattcactctcctctttttctggaggtgggtaccatcctgtttctagggctcctttttcattttgctggaatgcctccttgagtaactttcagactaggtggacagaagctcttctttcagagccactgcacacatccaaaaaggaagctgctgtttgctctgcaacagtgtagctccctttagcctgggagggtgaggagtctttgggtgaaaatattttgccagacacactctcctgtcagtactgagtcagggagctgatgggaaggccagacccttgagttcttcatctaagtggaggtgtctttcccacacatcctgcccacctctgctgtggaggttttgcccatgctctattcagcttctctattggaccttcacagctccaggagcctctcccaaaggctgccctgctcaaacagagctggatcaggctctgcagctggggcagacaggaacacaactgtcccagatgttgggattacagttctttaaggattaccctatgtttgctccttggagcttggggtttctctgggactcttttggtgagagccctgcacatccctggtatacaaggctactggtctcgttgcttgatttctccaccatcctgttgcacctgcttcctgtcttcctggaatttaccataatgtctggctgctgatggcctttcttgttttccagcactcttatcctgtccctcatgcacacgcatgcacacatgagcgaatcttctgtcatttcagagagacgctgggtaggaggggtgcagtgtgtgggcccaggctgcccccttgatcacactgcctttgtctttggaacagccccacacggttcagctggaacattcgaatggaatttttcaagcactccctgttctgggttgtcccctttggaggcttctcacatccttgctttgcagcgttgctagggaaggccatgcattatttaggactattttcctgtgcaacactcctctgcacaagaagtaacttgatagctccgtatcccagggaaaatgagggccccacctgggctgtggggaccatctgtgtggatgacgcttgttggcacagagttcatctgaagatgctgcttgtgtcccagctgtagtcacaaccctttttgctggggaaacagtgaagcttgtcaacagaaaacgctccaaattccaaatgcttcctagatgggagctgaggtctctgttggccatgacagggccagtcggtacagggatgccatattttagaagtagcattactacaggtaatgatacacttgacaatttgcatgattaagtggattgacacctaacagatgcagaccctgagggcagaggagccaagtcattgaggaagagatgacacttgatttgagtccagaaagatgaggcatgttcctggcaggaagtacaaggaatggtgttctaggaaaaaggagcagcatgaggggagtctcaggggcatgaaagcaattctgaggcttcggacaccaaaaccatagtctgtggataactgatgagcacagtgtctgccacagagtgtgtgtgtgcttgcacatgtgtgtgtctcctcctcatttcattccctgaaaacaaacagtgctcaggtctatttgagttcagctttcagggctgtcactcaaaccctcccctatctgccgaccattgtctaaaattacaagagaatttcacctcttgactctaagatgctgatcttttttcaaaatataaatacagggttggggtagggtagtgacttgtgtcttggcatcttctcactgcaggcagagaagacttcagagggcccagggaagcagcttaagccaccaatctctgcaccaagatctccacccatttccatcacagaaacaggccatcataactggatgcaataactttccccattttattgatagctaaacagagtccctgggaagtccaatggctcacctagggttgtgcaggtggtcagtgatggaaaattaaggaatattcagatcactggagaacttttgaaatgattaccttgtcatatttttagcacagaaccagacatccatccctggctccaggaaatcttcatcaagagcagaacattgttgtcaattaggatgatgtactgaggcatttgtagaaccacaataagtaaattatgactatttttaagggtgcttcctgggctgatggcctgaaataagacacattttagagagaacacctttaaggcaaggggcctgttacgtcataccatcatcacaacagcccatagatggaggtgttgctatccccattttacagatgataaaaatgtggagccacatttttctcctctattaaatgggtgttgggagcagaaactaggattccaagccagctccttccccctactttttcccattagggcaggcaggcaaatgcttcacttgtgttgcgtctcaccaagtacttctgtcagtgattttttttaatgtaaacttatttttgaagtataagatatatgtagacagcacacaaatcttaagggtgctgcttgatgatgtttacaaacaacatgctagtagaaccagaactcaattcaagcagcagaaaattccagcccccccttcccaacccccaggaatccctcatgcctcctccccatcactactcccttaaggtcacctctgccctaacttcatcaccttgcttttgcttctatacagaagacgtcacacaaaatgtactttttctcactcaaagttatgtcgaaagattcctccatgcttttacatataattgtggttccttcattctcgtggctgattagtgttctatatgaagttacacaatttatttttacattccactgttgatggacagtagaattgttgctttcagtttggtgctgttacaagtaatgctcctatgagcatttgtgaatgaacattttggtgaacatgtatatgcttttctgttaggtgtttacccaggagattcagcagttttagtcaatgtggctagttttccaaagtggttgtgcagttcacgttgccactaaaagcattgtgagcattctggttgctctacatcctcatcagcacttaatactatctttttcattttagtcattctttttttttctttcttaatttcaagtttttggtttcttaatttcaacaggtggtttttgatttcatggaaaaagtctttagtggtgatttatgaaattttgatgcactactcaatgtgtagtcttttatccctcaaccccctcccaccctttcccccaggtccctaaagtccattatatctttgtttttttttttgagatggagtctcactcggttgccctggccaaagtgcagtggcacgatctcggctcactgcaacctccgcctcccgggttcaagctattcttctgcctcagcttcccgagtagctgggactacaggtgagcaccaccatgcctggctaatttttgtatttttagtagagacagggtttcaccatattggccaggctggtctcaaactcctgacctcgtgatccacccgcctcggcaccccaaactgctgggattacaggcgtgagccaccgtacccagcttttatgtcgttcttatgactttgcatcctcataccttagctctcatttataagtgagaacatagatgtttggttttccattcctgagttacttctcttagaataatggtctgcaacttcatccaggttgctgtgaatgccattatttcattccttttttatggctgagtagtattccaaggtgtgtgtatatatatatatatatattatcatatttggtttatccactcattcattgatgggcatttaggctgtttccataattttataactgtgaattgtgctgctataaacatgcatgtgcaactgtcttgttcatataataacttattttcctctgggtagatacctagtagtgagattgctagatcaaacagtagttctacttttagttctttaaggaatctccacactgttttccataatggttgtactggtttacattcccaccagcagtgtaaaagtgttccattttcaccacatctacacaaacatctgctattttttgacgtctgttatttcttaaattatggccattcttgcaggagtaagtatttcattgtggttttaatttgcatttccctgataattagtgatgttgagcattttgtcatatgtttgtcagccatttgtatatcttcttttgagaattttctattcatatcctttgcctactttttgatggattatttgtttttttcttgctgatttgcttgagttccttgtagattctggatattagtcctttgtcagatgcatagtttgtgaatattttctcccactctgtgtttactctgctgattattttgctgagcagaaactttttagtttaattaggtcccatctacttatctttgtttttattgcatttgcttttaggttcttggtcatgaactttttgcctaagccaatgtctagaagagtttttcctgttatcttctagaatttttatggtttcaggtcttagatttaagtttttgacccatcttgaggtgatttttgtataagatgagagatgaggatccagcttcattcttcaacatgtgacttgtcaaatcccagcaccatttgttgaataggttgtccttttcccactttatgtttttgtttgcttggtcaaagatcagttggctgtgggtatttggctttatctctgggttctctattctggtccattggtctacatgcctatttttataccagtaccatgctgttttggtaactatagccttgtagtataaagttgggtaatatgatgcctccagatttgttctttttgtttagtcttgcttaggctatgtgagctctttttcagtttcatatgaattttaggattgttttctcttgttttgtgaagaatgataatggtattttgatgggaattgcattgaatttgtagattgcttttggcagtatggtcatcttcacaatattgattctacccatccatgagcttgttttgtgtcatctatgaattctttcagcaatgtttggtagttttccctgtggaaatctttcacctccttcattaggtatattcctaagtatttttcctttttttttttcttttctttttttttttttcttttttctttttttttttttttttttgcagctgttgtaaaagggattgagttcttgatttgattctggtcactgttggtgtatagcagtgctactgatttgtgtacattgattttgtatactgaaacttaactgaattcatttatcagatcaaggagctttttagatgagtctttagggttttctaggtatacagtcatatcatcggcaaatagcaacagtttgacttcctctttacagatttagatgccctttgtttatttctcttgtctgactgttctggctaggacttccagcatatactgttgaatagcagtggtgaaagtgggcatccttgtctcgttctagttctcagggggaatgctttcaacttttccccattcagtagtttaatgttggcatgggtctgtaatagatggcttttattaccttaagatatgtcccttctatgccaattttgctgaggcttttaatcataaagggatgctggattttgtcacgttttttctgcatctattgacatgcttatatgatttttgtttttaattatgtttatgtgatgtatcacatttattgacttttatatgttaaaccatccctgcatgcctggtgtgaaacctgcttgatcatggttaattatcttttttgatatgctgccgaattcagttagctagtattttgttgaagatttttgcatgtatgttaattagggatattggtctgtagttttcgttttttgttatgtcctttcccggttttggtattagggtgatactggcttcatagaataatttaaggaggattccctctttctctatcttttggaatagtttctttttttttttttgcagcaatatatcaatttaatttgtaaatgaggtataacaggtacactgcaaaagatatataagcatactgttcagtgaattcttaagtatatacacatgtaatcaccactcagatcaatacatagattcccagcactggaacagggctctcttatctttaatgtcaatagcaccaacaaccccagccccaccatctcacccccaagtaaccactattctcacttccatcaccatagattagttttgtctgtttctgaattttgtataagttgagtaaaatataattgttgtatgattctttttactttatattatatatgatttataagatcagttatgtatagtagaagtttttgttttgtgtggcattgcattgtattaatataccgtaatttatttatctactctctgatgtacatttgggtcacttccagtttttcttttattattattattattattattataccttaagttttagtatacatgtgcacaacgtgcaggtttgttacatatgtatacatgtgccatgttggtgtgctgcacccattaactcatcatttagcattaggtatatctcctaatgatatcccccctccccccaccccacaccagtccccggtgtgtgatgttccccttcctgtgtccatgtgttctcattgttcaattcccacctatgagtgagaacatgcagtgtttggttttttgtccttgtgatagtttgctgagaatgatggtttccagcttcatccatttccctacaaaggacatgaactcatcattttttatggctgcatagtattccatggtgtatatgtgccatattttcttaatccagtctatcattgttggacatttgggttggttccaagtctttgctattgtgaatagtgccacaataaacatacgtgtgcatgtgtctttatagcagcatgatttataatcctttgggtatatacccagtaatgggatggctgggtcaaatggtatttctagttccagatccctgaggaatcgccacactgatttccacaatggttgaactagtttacagtcccaccaacagtgtaaaagtgttcctatttctccacatcctctccagcacctgttgtttcctgactttttaatgatcgccattctaactggtgtgagatggtatctcattgtggttttgatttgcatttctctgatggccagtgatgatgagcattttttcatgtgctttttggctgcatgaatgtcttcttttgagaagggtctgttcatatcctttgcccactttttgaagggtttgtttttttcttgaaaatttgtttgagttctttgtagattctggttattagccctatgtcagatgagtaggttccaaaaattttctcccattgctgtaggttgcctgttcattctgatggtggtttcttttgctgtgcagaagctgctttagtttaattagatcccatttgtcaattttgtcttttgttgccattgcttttggtgttttagacatgaagtccttgcccatgcctatgtcctgaatggtattgcctaggttttcttctagggtttttatggttttaggtctaacatgtaagtctttaatccaccttgaattaatttttgtataaggtgcaaggaagggatccagtttcagctttctacatatggctagccagttttcccagcaccattgattaaatagggaatgctttccccatggcttgtttttgtcaggtttgtcaaagatcagatggttgtaggtgtgtggtattatttctgagggctctgttctgttccattggtctatatctctgttttggtaccagtaccgtgctgttttggttactgtagccttgtagaatagtttgaagtgaggtagcgtgatgcctccagctttgttctgttggcttaggattgacttggcgatgtgggctcttttttggttccatatgaactttaaagtagttttttccaattctgtgaagaaagtcattggtagcttgatggggatggcattgaatctataaataaccttgggcagtatggccattttcacgatattgattcttcctacccatgagcatggaatgttcttccatttgtttgtatcctcttttacttcattgagcagtggtttgtagttctccttgaagaggtccttcacatcccttgtaagttggattcctaggtattttattctctttgaagcaactttgaatgggagttcactcatgatttggctctctgtttgtctgttattggtgtataagaatgcttgtgatttttgcacattgattttgtatcctgagactttcctgaagtttcttatcagcttacggagattttgggctgagatgatggggttttctagatgtacaatcatgtcatctgcaaacagggacaatttgacttcctcttttcctaattgaatgcccaccttctcctgcctgattgccctgtccagaacttccaacactatgttgaataggagtggtgagagagggcatccctgtcttgtgccagttttcaaagggaatgcttccagtttttgcccattcggtatgatattggctgtgggtttgtcatagatagctctcattatttagagatatgtcccatcaatacctaatttattgagagtttttagcatgaatggttgttgaattttgtcaaaggccttttctgcatctgttgagaaaatcatgtggtttttgtcatttgttctgtttatatgctggattatgtttattgattttcatatgttgaaccagcgttgcatcccagggatgaagcccacttgatcatggtggataagctttttgatgttttgctgggtttggtttgccagtgttttactgaggatttttgcatcaatgttcatcaaggatattggtctaaaattctctttttttgtgtgtctctgacaggctttggtatcaggatgatgctggcctcataaaatgagttagggaggattccctctttttctattgattggaatagtttcagaaggaatggtaccagctcctccttgtacctctggtagaattcggctgtgaatccatctggtcctggactttttttggttggtaagctattaattattgcctcaatttcagagcctgttattggtctattcagagattcaacttcttcctggtttagtcttgggagagtgtatgtgtcgaggaatttatccgtttcttctagatattctagtttattttcatagaggtgtttatagtattctctgatggtagcttgtatttctgtgggattggtggtgatatcccctttgtcatttattattgcatctatttgattcttctctcttttcttcttcattagtcttgctagtggtctatcaactctgttgatcttttcaaaaaatcagctcctggattcattgattttttgaagggttttttgtgtctctatctccttcagttctgctctgatcttagttatttcttgccttctgctagcttttgaatgtgtttgctcttgcttctttagttcttttaattgtgatgttagggtgtcaattttagatcttacctgctttctcttgtgggcatttagtgctataagtttccctctacacactgctttgaatgtgtcccagagattctgatatgttgtgtctttgttctcgttggtttcaaagaacatctttatttccgccttcatttccttgtgaacccagtagtcattcaggagcaggttgttcagtttccatgcaattgagtggttttgagtgagtttcttaatcctgagttctagtttgattgcactgtggtctgagagacagtttgttataatttctgttcttttacatttgctgaggagtgttttacttccaagtatgtggtcaattttggaataggtgtggtgtggtactgaaaagaatgtatattctgttgatttggggtggagagttctgtagatgtctattaggtccgcttggtgcagagctgagttcaattcctggatatccttgttaactttctgtctcgttgatctgtctaatgttgacagtggggtgttaaagtctcccattattattgtgtgggtgtctaagtctttttgtaggttactaaggacttcctttatgaatctgtgtgctcctgtgttgggtgcatatatatttaggatagttagttcttcttgttggatggatccctttaccattatgtaatggccttctttgtctcttttgatctttgttggtttaaagtctgttttatcagagactaggattgcaacccctgcctttttttattttccatttgcttggtagatcttcctccatccctttattttgagcctatgtgtgtctctgcacgtgagatgggtttcctgaacacagcacactgatgggtcttgactctttatccaatttgccagtctgtgccttttaattggagcatttagcccatttacatttaagattagtattgttatgtgtgaatgtgatcctgccattatgatgttagctggctattttgctcgttagttgatgcattttcttcctagcctcgatggtctttacaacttggcatgtttttgcagtggctggtaccagttgttcctttccatgtttagtgcttccttcaggagctcttttagggcaggcctggtggtaacaaaatctctcagcatttgcttgtctgtgaagtattttatttctccttcacttatgaagcttagtttggctggatatgaaattctgggttgaaaattcttttctttaagaatgttgaatattggcccccactctcttctggcttgtggagtttctgccgagagatcagctgttagtctgatgggcttccctttgtgggtaaccccacctttcactcaggctgcccttaacactttttccttcatttcaactttggtgaatctgacaattatgtgtcttggagttgctcttcttgaggagtatctttgtggcgttctctatttcctgaattcgaatgttggcctgccttgctagattggggaagttctcctggataatatcctgcagagtgttttccaacttggttccattctcccagtcactttcaggtacaccaattagatgtagatttggtcttttcacatagtcccatatttctcggaggctttgttcatttctttttattcttttttctctaaatttctcttcacgcttcatttcattcatttcatcttccatcgctgataccctttcttccagttgatcgcgtcagttactgaggcttgtgcattcgtcacgtggttcttgtgccttggttttcagctccatcaggtcctttaaagacttctctgcattggttattctagttatccattcgtctaattttttttcaaagtttttaacttctttgccattggttcaaacttcctcctttagcttggagtagtttgatcttctgaagccttcctctctcaactcgtcaaagtcattctccatccagctttgttccgttgctggtgaggagctgcgttcctttggaggagaggcgctctgagttttagagtttccagtttttctgctctgttttttccccatctttgtggttttatctatgtttggtctttgatgatggtgacgtacagatgggtttttggtgtggatgtcctttctctttgttagttttccttctaacagacaggaccctcagctgcaggtctgttggagtttactggaggtccactccagaccctgtttgcctgggtatcagcagcggtggctgcagaacagcggatattggtgaaccgcaaatgctgctgcctgattgttccttgggaagttttgtctcagaggagtacccggccgtgtgaggtgtcagtctgcccctattggggttgtctcccagttaggctactcgggggtcagggacccacttgaggaggcagtctgcccgttctcagatctcaagctgcgtgctgggagaaccactactctcttcaaagctgtcagacagggacatttaagactgcagaggttattgctgtcttttgtttgtctgtgccctgcccccagaggtggagcctccagaggcaggcaggcctccttgagctgtggtgggctccacccagtttgagcttcctggccacttggttttacctactcaagcctgagcaatggtgggcacccctcccccagcctcgctgccgccttgcagtttgatctcagactgctgtgctagcaatgagtgaggctctgtgggcataggaccctccgagccaggtgcgggatataatctcctggtgtgccgtttgtttaaggcgttggaagagcgcagtattagggtgggagtgacccgattttccaggtgccacctgtcacccctttctttgactaggaaaaggaattccctgaccccttgcacttcccaggtgaggcgacgcctcgccctgctttggctcatgcatggtgccctgaacccactgtcctgtacccactgtccggcactcccctgtgagatgaacccggtacctcagttggaaatgcagaaatcacccatcttctgcatcgctcacgctgggagttgtagactggagctgttcctattcggccatcttggctccacccccccagtttttcaatattacatattaaactgctattgggttgtgtctgcaccagccaggagctttccctgacacagaagagggagatgatctgaaagtctataggcagcagcaacagcagtggaatagtttcggaaagattagtaccaattcttctttgaatacctgatagaattcagctgtgaatccatctggtccttgactttttttttggtggcaattttttattaccatttcaatttcactatttgttactggtctgttcggaatttctatttcttcctgatttaatctaggaaggttgtatatttcaagaaatttttctatctcctttaaattttctagtttgtatgtgtaaaggtgttaataatccccatgaatgcacttttgtatttctgtggtatcagttgtaatatctcctgttttgtttctaattgaacttatttggatcttctcttgtcttttcttggttattctcattaatggtctatcagttttgtttatcttttcaaagaactggctttttgttttatttatcttttgtattttttgtttcaatttcatttagttctgctgtgatctttgttatttattttcttctgctgagtttgagtttagtttgttcttgtttctctagttccttgaggtatgaccttagattgtctattcatgttctttcagctttttgatgtaagcatttaatgctatgaactttcctcttagcactgctttgactgtatccaagaggtttttgtaagttgtgtcactattatcgttccattcaaagaaattttacatttccatcttgatttcattgttgacccaaagatcattcaagagcagattatttaatttccatgtatttgtatagttttgatggttccttttggagttaatttccaattttattccactgtggtctgagaggatacttgatataagtttgattttcttaaatttattgagacttgttttgtggcctatcatgttgtctatcttggagaatgtcccatgggctgaagaaaagaatgtatattctgcagttgttgggtagaatgttctgtaaatatttgttaagtccatttgttctagggtatagttgaactccattgtttctttgttgactctgtcttggtgaactgtctagtgctgtcagtggagcattgaagtcccccactattgtgtagttgtctatctcatttcttatgtctagtcataattgttttataaatttgggagctcctgtgttaggtacatatatatttaggattgtgatattttcctcttggagtgatcctttcattatgatataatgtccctctttgtctttttttttttttttttttttttttttttttgagacagagtctcgctctgtcacccagcctggagtgcagtggcatgatctcagctcattgcaagttccacctcccaggttcacaccattctcctgcctcagcctcccgagtagctgggactacaggcacccgccaccacgcccagctaattttttgtgtttttagtagaaatggggtttcaccgtgttagccaggatggtctccatctcctgactttgtgatctgcccaccttggccacccaaagtgctgggattacaggtctgagccaccacgcttggccccctctttgtctttttaaactgttgttgctttaaaacctgttttgtctgttataagaatcgctactcttgcttgcttctggtttccatttgcatggaatatctctttccccactttaccttaagtttatgtgagttcttgtgtgctaggtgagtctcttgaagacagcagatacttggttggtggatttttattcaccttgatgtggtactctcctgcttcccctagggacggggctacctgagagctggactgcaaagattggtattgctcttctgggtctaaccatgcagtggggctaccaggctcttggctggtgctgggagatgtttgcaaagagtcctatgatgggatctgtcttcaggtctcccagctgtggataccagcacctgctctggtggaggtggcaggggagtgaagtagactctgtgagagtctttggttatagatgtttagtgtgctggctttctctaatgctggttatgctagcagtgagattgtaatatggacagacttgggacccacttgctagccaggatttggcatgcagtggaattaactcctgtttctccttccttggagcaaggttgttctgtcatgagttgctgtaatgtcctgagttggttggcctccagccaggaggtggtgctttcaagagagcaccagagtttttttcctgtttcacagaatttgcagtggcctgctccttcttttcattatgttattttaattacatctgagagttacagaatgaataaaaatttagaagtagacaaacatatgagtcctcatttttacattaatatataaatgtaagtagacaataaaaagtagaagaaaagcctatttttagaaaagaccaaattaatagctcctaacagtgtcagggacatttatttgttcatcagttgagtctgcatagacaatctttgaatcaccacagctgtttgagcaaacctggattggaggacaagctatgcagttaactctgaattttggctaaatatttgacaacttctaagcagatcctatcagacgtcttcatcactccagacttcagtcccaggcatcacaggaaagaggatatcatcattttagtcttccttgttggtatgtggcagagtcatattatggtattaatttctactttcctgatgattcatgaagttgagcacttttacatatgtttattggccatttggatattcacctttatgaacaatgattctttttcggttttatctttagtcaaaaaatagttctaagaatagctcccatactggaaaattctgtgcttcctttcctatccaggtgattatttccaagctttgacatttggtagttctaagaaaagcctcaaagccaggagaggtgagaaagaagagccaagagaatgggcgcagccaacgttgggcactctccgagctcttaaagttccacagtgggggcaggaactcaaggactttctctgtgcactttggaattgtcagtttactctcccctcagaagttcggagagatgatttatatttcacatttagagctagcaacgtactctgaactccttttccttcttcctttggaatttagaatctagattgatttcagtgactgcagagagatgaagataaaagacattctgtcctcttcagcccctaattgggcaggcaacacacagggagttgggtttgctgacaaggctaagcattttgggcgttgaatacctattatgtgcctagggcattaaagtgataagaaaatctcttaaggtctgccaatgattttgaaattttaacagctcagttttcctgatgccagatgggggacagggagtgggagaactgggtacaagggtgttgctggaggagagatggggacaccctgagggagggttgtcaaatgttggcctaggcacagtgattgggtgactgggaggtgagcgatcagccttctgcacctggaaaatagggcatggctgggcttcccctgtccagcctcattttgtatgaggatcgatatactgtctccatatttgactattctgaagattttgtacaagtggaattatacaataaaaataataattattttaaaaagagaatacaaaaaattaaaaaaaaaaaaagataaaaaagaggatacagaggtgagtgtttggagtcactagtgctccctgcagatagccttgggatctggcctcaagtgaaggagagctggatgtactcttgtgcacagcttccaaagcatgctccccaagccccactttaattttaatggctccccttattaactctgcagctcaggtaaataaaaattcctataaaacatattctcgactcttgactacattcccatgtaaaaagtacttcactgcaggttgtgataaaaaaatgtttgaaagctgcaggcctcgggtggatctgtagagggcctttctctgtggtactattcctatcacaactcttgtgttagtatttaccactcaacagttttgttgtatcttagtacattataggatgtttatgaaatatcatttattctattaccaaaaaagtattaagatgcaggttcaggcttccagcatactcctggaggactggggaaaccaggcctgtacaaaccataccagatgccatgtgaccaccatcatcatcttccttccagctgatgctaactgatcagcactgttcctctccccacaaacctccaggctgtcctgttttattcctcctttgcctttgcctgttctctctgcctaggataccctccccacccttatgtgcctttaaccctcctattcactcttcaaaaccccattatgtgtcctctctgtgaagctttcaaacagctcttctatataagaaattcccagtttctgtacctgtatatttaagaattattgcatatattacactctattaaaatgattcacctatttaaaatcccagatcatgagcctccaccacccccctacctgcccccaccctcttccagagctgcctctggtgctagcttagttatccctgtatccccagggctaatcaaagggcctggaccagaataagagcttaataagggggtctgcaataaacctagttaaagttggtttaactggtcctatgtccagtggttccattatttatggattttaacttacaaatttttccagaactaggtgctggaagaaaatgtaacccgctgctgaccatcaaggaaagctataggggaagtttcagggttcacaggcatttcagacagcctctcagaatctaacctgtttgtagaggaaacccctctgcagatccacccaaggccaccagcttttaaacattttccatcatgacctgaagtgagaagtccttttcacattaagacacaccaggccgggcgcggtggctcacgcctgtaatcccagcactttgggaggccgagaagggcgatcacgaggtcaggagatcgagaccatcctggctaacacagtgaaagcccgtctctactaaaaatacaaaaaattagccgggctggtggcgggtgcctgtagtcccagctactagggaggctgaggcaggagaatggcgtgaacccaggaggcggagcttgcagtgagcccagattgtgccactgcactccagcctgggcgacagagcaagactccatctaaaaaaaaaaaaaaaagacacgctgaacacctacatcagagaccagagacaaggctttcatgaaacaatatttatccttgctatgggtattgctcccattttctctttttttaaaaaaaattatggctggtcaccacccattgaattgattttgtgactctttagtctcactggttgcattccacagtctaatgaacactcctctaggccttcagcttatgtaaccagagaaatcttctccaaggagaagccattgaccctgaaggccagctcagaggagcaggcaggaggcggtatgcagtgggggctgggatgagaaggtgccaggatggcacagggcacactctaactgcttccctctcattgcagccgagcccctgccactgatggacctgtgccggagatccatccgctcggccctgggccgccagcgcctgcaggacatcagctccctgcccctgcctcagtctctcaaaaactatctgcagtaccagtgagccaagcctgatgggcagcacagacacagacacacaccgcagggcccgaccctcctgtcattcacagtcccatggcacataggggaaaggatctacccttctcctggctccccaggacactcagttctttcaaagaccaggatgtggtaccaactttggaaacgaaaggtctcttgccaacagtatctactgccctcgaggcagccctcccaagtcagacacctccttcggagccacagagagcctggagtctgcacctcctggaaatcctgccaccaaccaggacacagcagccaccgtattgatcagagagcctgtttccttattcaagagaatgaataaaacatttaggcaggagactttctattgtgtgccccgttgcagacagggccagggagaaattagccagtgcagggggaaaattgcctctgaataatgaatgatgaaagcctgacgccgtgcccctcctggcccatacgccttgccagggcggcaggattgtcacaccgttttaggactctgtgccactttgagagactgttcccaggaggcccaaccgcagacctggcaagtggacagtgcagtgtggagacaccttccggcttacctctttgaacgttgtttacctacccctttccacgtgctccccttcccagccactgactcacagttctctggatgcccagacacctctcttcagggaagatgagtctgactggtttgccccagggaagagcgtatccttaccattattttaagtagcatttgcattttaaaagaggaatgcggagaggacagtacttagtccaaaggtgctaacgggggaactgggggcattgtgacacccaagtctgatgtgtcctgggttggggggccttcctggagtgtcagggtctctgggcaacgtccattcagggtgcggcatggctgtcacaaagctttatttgagcaaattattttttcactttaggagacttctacaagtttgtttcctgtttcaaatgtgtgtgtgatgtgctgtttatttatcagcttgaggtccatgggggcagccttgtgactggaagggtggatatgggagacacattctctacctgctccgagcctggtcctctcgcaggaatgctgctgctgcctccgccgccactgctgctgccacctcttatatgtttcagacactctctgcccagactcatttttaactggaaatcatcacagcagtgggatatcagagccccagacagcactgcctcttcctccccaccccactgcccccaccttaatgtgaatttgactgatgaatgaagagcgtttctaataaagtttgtcattcagtccttcagctgcgtattaaatgttgtttggggagggacccagagagcttcttccatcaacctgcctggtccgtcagactgatagaagccaggcacgtgaatccctctttagacatttcttgtctcttctgacttgtggtccttgcttgagcccaaactccagctattttgcaaaggcctgccctggacaagagaatgtgcctgtgtcctgggtacatgcaaagctgaccttatggtggagaaacaactcagcctcctgttgccagagccaaggggtagccctgcaaaggggcttagggtcaggcagggcaaaccctatggaacaccagtttccaagtggactggaggtggggctggatgtgactgtagtgaatgcatgttgtcaccaaggagcagtgcaaattgttgaagcatgagtgtaaagaaaggccaggctcagagctgatagcagttcaggagttagagtcaggatagggtctgggtaaggactggaatagcattcattcagcagtaccagccaacagcatgcgctgtgccaatttccagggacccagcgcccaggctgatatatctcatctccagagatgtgtagtacagcataataaagtgagaaggagctcatgaagaggggtggatgagaatagaatatgaagggaaggcttcctggaggaagaggcactctccagacttgttattttaagggcagacaagcttcctgaggaccaccaagagaccaaacttgcagcacctgcccccagggtaatgtttccagctctgacctcggggctgggctccgcatcaggcagctttcagtcattttgtttgccaaaggcagcttcctgtggccatgacatggaggctttgaggctttgtgtgtaggaagcctgggtttgagtcccagcttcatcgtttatgtgctatgaccttggggaagtcacttccttctgtgcacactgtgctggctgagccaggtagccagtaactgggaactcttcctctcccagctcatggagtccccatctcagcaccagctttccagcttggatgcatctgtcttatctcggcttccaagcctcacttatgtggtttccctcaccctaacaatgtcctccccatctttaccctctcaaggatctggcttagcgtggcttccttgaggaagccctctttaaccactccccccatctctgcttcttctgagaattcagctcttcatgtcctgacctgaggatgccactcctggggcccaggaccctctcctgagcacagagacttgagctcctttgccctgtggtctcacctgcccagggagctgtggacctttgacgggcagggcctctgcctgctccttcccacacagcccagaccagacacatgggctcagcaaagatggagtggtgggtgaaggtgcccctgcagctgggatgaccatgggaaactgcaaggaggagcggggaagggaggatcctcccagagccaagaacctggccttgaggcctcacggatctcttgccctttcattccctcaccttttcccaggtatttataaggcatttttcatgcactcagcactattatgagaacatgaataaggaaatctggccctgccatatcagagctcacattctaagggagagacaggacacacaagcaaagaaacagatgatgtcagagggcggagatgagcagcgggtaggctagagccagggagcaaaagggacccagtaattgagggtgatggggggaggccctctgggaagatgctgagtactgaagaaatgagagggagccaaatacctgaaagggcgtggatctccaggtcatggggggacttctggctctcccaaccttctcaaagtgggaactcccgagccccaatgagttgagctgaggaaaggaagcccctgtgctgccactcctgcccaagccgcagctcagcatccctgtgtgtgtgagccccacacacctccaggcttgcttgtgcaattgtgctccctgcaggcatgcaagtgcacccacacacagacacacacacgaccaagggcctctccccagcagacatcctgggagctcatgaccaccccccagcgccagagtccattataacccgggcccagccccctcccatgcttggcacattctctaaagtttggcctctccacgacccatttccagcagggggacttgccaaagcagtctcgctagtcactttgtaattgtctacgaatagagcatatggtggcaccgtcccccacagatctgatgatccccatgagcaccctgtttcactctaccccatttgacattcccatattctgagtaaagccaccctttttcccttgctttcctcctctgtcatctgcactagcagctggctcctgtgtgggttatctttcactaggaaacaaacatttcatctccttacagtgttacagaagaagtgggagcaggtagcaagtaaccccattatatggcagttgatttgtgccagggcagctgtctctgtccccagggccttggtcccagccacagcctctgaacaggcggcgcatatttgccaagtcagaagaacagggaaccacacagcattactcttcaggtccctaacaaggagtggaaatgcccagttttagtccaaaacacaagaaaattggtccactcttgcctatagttctgggtgcttggatctcattccagcctacagatttgttttgttatcatacttgtgtgtgtgtgtgtgtgtgtgtgtgtgtgtgtgtgtgtgtgtgtgtgtgcgcgcgcgtgtgttttaataaaattgagcctaacaaagaaaaatcaagtaatttaatagaaaaatccagatttcagacttctcttgaaaaatggggagaggtgttaaagccaggcccacattccttcatggtgaggttggccaaagctgagtaaaggaaaggcctctgctctgtggtccagccctacgtccaaccctcccacaacatagcactgggacctctcactgccgccaccctcaagggcgttcactccctgcgtctgggctaaggcttctgagtttgcttctctggactattggtataagacacataagtgggtagtaagtacccacacgtaggcgtgcacacacatacacacacacgcgtgcacacacacacacccacgacagagggagggctcaggaggggagagtctgctagctctgcacttgactttgaagtctctccagcctcagccaccaatattcaaggagctcacagatgcccaggatctttactcagacaccagagaaacccaggtgttcctggctagatggtgaactcctagaggacaaggacaagaattctcagggcctatttgtaatgagctgggtgacatgattagacagcctggctgcacattagaatcccttgaggaactttgtaaaaagtcccagtgtacaggcccttcttcagtccaattaaatcaggacctctgtgggtagggccgggccatggcagtttttaaagctccctagatggttctaatgctcaactagggctgagaaccactggataaggcgcttaattaagtcagctccttgaagaggtggttgacgtttgtgagaatgcacatcctagaccagaaaacgctggcccaggctccctgcattcccacagccgacgggatactgagtggtgggagtccccagtgtggccaggtccaaaggcagggagtccctcccagcccttcttccccctttccagcgatgccgagctggttgctcctgagcatgggggagaaaggaccagccacacctgccctgatgctgcacaattcttgacaaattgactgcagccccactcgctccctgacctgtgaggcccaagctgtggggcagtcttcccagacagcattgtcctgagcaatcagaataaccttagaattagaagtgaagagcagactgagaatggcttggtcttcaatgtactattttgaatagaaaaatttgagcttatgagaatttgagatagtgagtggtttggttcctggcatttccaaaccttgctttcttaaggccaggtaacacatttggccaataataaataataaattataattataaattatatgcttatcattataattataatttatatttatatttgtatttataaattatatagttataattataaaattatgcccttcacacacacacttctaggttttagagtaaaatgagccatgaacaagccaagcctggcttgatggcagtgttagtgtccccagctgctctgcctcttcaataagcagggctctttccctgggaggaggcctggtactgggtgagtgcagcccagttagtccatggaggaggatcagggtaggtcatttcccttcttccaaccagctccaggggcctcagtaacactgttcctatgcctggggatttccattcaagggagataatatgttgatgatttgctgcacagtgatggcatttaaaaaaaaaaagagttgcctgttacttgcctgattcaacaaatggctctgtaccaagctctgtgcaagctcaagaacactcctgctgcccgagagcgcccctacacctcagggagaccaacaggcaaacaggtgtcaactgcctgctgacaggatgggcagcaggccagtggagagaaggcacaacagaaacaagtgctggagtgtagagagcatagagtgtggtggggagtgttgaggaatcccagacaacagaggagaagctacatggggtggctcgggggacacacactgatgaagggtggggccttgcaagtcacactcaggaataaaggtttgggatttgtcttagtaagttcgtgttgctatgacaaagtaccacagactgcatagcttgtaaataaccggaatgtaaatattcctcacacttttagaggctggaagtccaagatcagggtgccagcatggtcagtttctggcaagggccctcttccgggttgctgactgctgacttctcattgtgtcttcacatggcagcgagcaaaagagctccctagggcctcttttataagggcactaatcctattcataaggctccactctcacaacctaattaggtcccacctcctagtaccattatgttgagggttagggtttcaacatatgaactttggagggacacaaatagtcagtccataacagtatgggtcaatgttctaggaggaaacagctagcacactgaaatagtagactgaagagagttcagtaagaaagggactatttacagatgcatgggcagagttcggggaaaccagcagctgagggtgaggaaccctggggtggcaacactgggagggaaaaccattagcatccctaggctcaaagggccaataaaagggagcagtaactgggaaaagaaaaaaacacagctgtaagagagagccacccaacaggagatacgaggttagatggaggaacagagccacagccactgccaactaaagcctggcaaggaggaagcaggacataaatattctcacttgcccttgctcttcctctcatctcctgtctgtgcctcccactggctgaaactcaggagcacagcagacaagggaacctgattggtatcatccacagacatcagctttctacacacagagcagggcagaggaggagggagagtggacgagtgtcaggagaagactatatgcaacagactttatctataggataaacaaacaaaattgcaaaaatgcaaaacttgagtgcataaatagataaaagctaatttgtttcaaatgtgggtgggggacttttgaaccccactcccgtacctctcccatctgaacatcagatgctaaatacctgaaacacctccaaagagccttaggttatcatcaaaattacattattcctaaagtacaacccaaatgtgtgacacaaacaggtaggtccagagcctagaactagattttgtaaatgctgttgcaagagcgacagaggatttgaagtgggaatgatgaggtccagtttgtgtttttgtacagccttcctgcagggtctttggatgggggcttagcaagtcagcaggagtagaggtgggtagcgggcatggtggctcatgcctgtaatcccggcactttacaaggccaaggcaggcagatcacttgaagtcaggagttcaagaccagcctggccaacatggagaaaccctgtctctactaaaaatacaaaaattagctgggtgtggtggcccacacctgtagccccagctacttgggagggtgagtcaggagaattgcttgaacctgggagtcagaggttgcagtgagccaagattgtgccattgcactccagccagggtgatggagcaagactccatctcaaaaaaaaaaaaaaaaaaccaagagtacaggtggggaaattgagggaaaggctgttggttctagggagaaaaacagggcctgaatgaagtccatgggagtaggggctgggaaagagagctgctgcaaacaggccaagtccacagagattagtgacttggtgcatgcaggactccggcaagaaaagaagtgaggacactcgcaatccattcattcacttgttctctatacatttattcggggcctgctatgtgtgaggcactgctgttgatgcagaggacactacaatgaagaaaacaaatataaaatctgcacccttggagagcttatactctagtacaaaaggtgcatagacaggtaacctggtaaatgtaaagtatctcacatgcatgctaagccaggaaggagtagagagagcagatggctgcgttgccacagtagtgtgtttgtaaatgtttaacaaccatctctctggggataagtaaaagatttgtagtgtttgctgttttccataatgtaaatactcccaccacagccaattttaagctccaacgtgatgccactgaatgcagattgggaaaagatgatcagtagccaaccatcatagagtgtttccaatcatacagatatggtagatgtaaatgatctgaacagcaaagataataatgaaatgtagtaaaataattaaaaagtgatgagttttaagtatttatttgtttttaatgtaatttatttaattgtacacttatataatttaatttttaataatgactgtaataaatagccagtttgaaagatttccaaagttttaaccatcagtttttgcaagccagtatgagctggctccaggatactactatgttgctgaaattaggattatcccatattaattctgaccttgtttgggtactctaccaagtttcagcacatttcacttggcctaacattacaatggtcccttttctgacagtccccttgatgagtgatgaagataagctggcttagagtagatgggagtgagggaaaccaagcctcaatgaagttttcacagcaatgacctacacagagtctgacccatgtatgagagtttatacctctaactattcctgggcacccagcatgcacacaacattaccagagacactagttcaaaacagagatgcaaagatctgaaaatgttagcaaatcaaacttaggagtatatatatatatatatatatatatatatatatgtgtgtgtatgtatgtatgtataggttcatcatgaccaaagtgaattcattttatgagtacaagtttggcttaataatcaaaaagtgatataatcatattgtccaaatttaaaaaattaaaaaaattatcatctcaataaaggtagaaaaattatttgctaaaattcaataccttgtttatgattctggaaaaaactttcataaaactaggaagagatacacttacttaaactagtaaaggatatcctatgaaacacctacagctgatatcatatttaatgaaaaattattgaatgcttccttttgagatgagtagtaagaaaagttgccctctattatcacttctacacaatattgtattggaaaccctaggcagtttaataagccaaaaataagaaattagaaggtataaaaatcggaaggaaagaaacaaaaccaccatcatttgcaaatgacatcattgtatacataggaaaaaatataggaaactatgagaattcataaggaaatttagaaaatatgaatacaaggttaatattttagaagttgtatttctacatattaacaacaaacaattagaaaatgaaatgtaaaacaatgccatttatagtaacaaaaatagaaaaatctaatgaaaaatgtgcaagacctctacactgaaaattacaaaacattggcaaaagacatggaagaactaaagaaatacagggctctaccgtgtcaattggataattcaatattgttaaaagtgtcagttctacccaaagtaatctgtacagtcaatgcaataaccaaacaaattttctgagctttttttgtggaattgacaagttgattctaaattcatttgaaaatgcaaaggacctaaaatagctgtaacagtattagaaaagaaaacaatgtcaagccaagatggccaactagaaacagctagtatgtgtggctctcatggagaggaacagaaggcgtgagtaaatacaacaccttcaattgaaatatcctgatacttgcattgggactaatcaaggaaacaacttgacccatggagaatgaacaaaagcaagacaggacagtgacccacccgggagcaacacagagccagggagaccctcccctgcccagggaagtggtgagtgaatgtgaaaccccaggaaaccacacttctcccatggatctttgcaaccctcaggtcaggagatctccttgtgaacccactccacaggggccttcaatctgatagacagagctatgtggactcttggcagagcagctgttcaggcatgtatggagagcctggagacttagatacttgggctttccagcaaaaagtagctgcaggtccaacaaaatgggagattagactcccatacatacccctaggaaagaggctgaatccagggggctgagcagtgacaacctgcaggctccacttccacggcacttcacaagataagacccactaacttggaattccagccagccaccagtagtggcattgcacctccataagaaggagctcttagggggaggggttgaacactatcattgctgtttgggcaccttagccattccaggcttcaggctgtggagagtctgagccaacagagggcagaagggatcccccacagcacagttgctctaccaaaacatggccagactgctgctttaagcagatgcccgatcctgttcctcctcactgggtggggcatcccaactgagcgtccagccacccctgcccatgttcaccatctgacagagatttgaattctcctcggacagtgctcccagaggaatgggtgggccgccatctttcctgtttaggccacttagccaatccagccttcaggctttggaaagtgagcaactggaggcagaagggatcccccagcacagcacagctgctctaccaaaatgtggccagactgcttttttaagtgggtcttcaatcccattcatcctcactgggcaggacctcccaaccagggtctccagccacctcctacaggtgcctttgagctggcaacaggcctgtacatttttggaatgaagttcctagagggtggaacaggctgccatctttgctgttttgcaggcttcactggtgatacctccagatactggaaaatgtaaggtgactggagtgaccctacagaaaagcagccagactgttacatgggtgcccattcccatatctcctcacaaggcaggtcctccaggcctgggcctccagccaccctacgccagagctatcgaaccactagcaactcagcgattccctgagcagagcctccagggacaactgaaagcctctctgccactgcctctgcagtggaactgcccttgccaccctctgactaacgaaggtgtaaagaccctaagtgctttatccatacttccaacaagctgcagtcaacct

SEQ ID NO: 2396 - DNA, 2576 bp, Homo sapiens
gcccgacccccggcgcctgagcgccaacttcgccaagaacgctcctaactccaggccatcctgcagcgcagagggggcgctgctgccgggcatcagccgtgaggacgcgcccctggccgtgcggagagagccggcatttgcgggtcactcgggcgcccctgagtgggcggcggcggcagcagacccctctccagggagtccaggacctgccagcgctggggattcttcccgaacaggcgcttgccctctcttttatggagcttgggcccctgccgcagcccggtagaggctgtggaggtctaccgtccggaagcctggttcccagccccgtggcccattcctggctacggggagtggaggctcccacgaggtagcggtggcctgcagcggcctcctccccgcagtgaagcatgggccagaagctctcggggagcctcaagtcagtggaggtgcgagagccggcgctgcggccggccaagcgggagctgcggggtgcagagcccgggcggccggcgcggctggaccagctgttggacatgccagcggcggggctggctgtgcagctgcggcacgcgtggaaccccgaggaccgctcgctcaacgtcttcgtcaaggacgacgaccggctcaccttccaccggcaccccgtggcccagagcaccgacggcatccgcggcaaggtgggccacgcccgcggcctgcacgcctggcagatcaactggccggctcggcagcgcggcacccacgctgtagttggtgtggccacggcccgtgctcccctgcactccgtgggctacacggcgctggtaggcagtgacgccgagtcgtggggctgggacctgggccgcagccgcctctaccacgacggcaagaaccagcccggcgtggcctacccggcctttctggggcccgacgaggcctttgcgctgcccgactcgctgctcgtggtgctggacatggatgagggcacactcagcttcatcgtggatggccagtacctgggcgtggccttccgaggtctcaagggcaagaagctgtacccggtggtgagtgccgtgtggggccactgtgaagtcaccatgcgctacatcaacggccttgaccccgagcccctgccactgatggacctgtgccggagatccatccgctcggccctgggccgccagcgcctgcaggacatcagctccctgcccctgcctcagtctctcaaaaactatctgcagtaccagtgagccaagcctgatgggcagcacagacacagacacacaccgcagggcccgaccctcctgtcattcacagtcccatggcacataggggaaaggatctacccttctcctggctccccaggacactcagttctttcaaagaccaggatgtggtaccaactttggaaacgaaaggtctcttgccaacagtatctactgccctcgaggcagccctcccaagtcagacacctccttcggagccacagagagcctggagtctgcacctcctggaaatcctgccaccaaccaggacacagcagccaccgtattgatcagagagcctgtttccttattcaagagaatgaataaaacatttaggcaggagactttctattgtgtgccccgttgcagacagggccagggagaaattagccagtgcagggggaaaattgcctctgaataatgaatgatgaaagcctgacgccgtgcccctcctggcccatacgccttgccagggcggcaggattgtcacaccgttttaggactctgtgccactttgagagactgttcccaggaggcccaaccgcagacctggcaagtggacagtgcagtgtggagacaccttccggcttacctctttgaacgttgtttacctacccctttccacgtgctccccttcccagccactgactcacagttctctggatgcccagacacctctcttcagggaagatgagtctgactggtttgccccagggaagagcgtatccttaccattattttaagtagcatttgcattttaaaagaggaatgcggagaggacagtacttagtccaaaggtgctaacgggggaactgggggcattgtgacacccaagtctgatgtgtcctgggttggggggccttcctggagtgtcagggtctctgggcaacgtccattcagggtgcggcatggctgtcacaaagctttatttgagcaaattattttttcactttaggagacttctacaagtttgtttcctgtttcaaatgtgtgtgtgatgtgctgtttatttatcagcttgaggtccatgggggcagccttgtgactggaagggtggatatgggagacacattctctacctgctccgagcctggtcctctcgcaggaatgctgctgctgcctccgccgccactgctgctgccacctcttatatgtttcagacactctctgcccagactcatttttaactggaaatcatcacagcagtgggatatcagagccccagacagcactgcctcttcctccccaccccactgcccccaccttaatgtgaatttgactgatgaatgaagagcgtttctaataaagtttgtcattcagtccttcagc

SEQ ID NO: 2397 - protein, 271 aa, Homo sapiens
MGQKLSGSLKSVEVREPALRPAKRELRGAEPGRPARLDQLLDMPAAGLAVQLRHAWNPEDRSLNVFVKDDDRLTFHRHPVAQSTDGIRGKVGHRLHAWQINWPARQRGTHAVVGVATARAPLHSVGYTALVGSDAESWGWDLGRSRLYHDGKNQPGVAYPAFLGPDEAFALPDSLLVVLDMDEGTLSFIVDGQYLGVAFRGLKGKKLYPVVSAVWGHCEVTMRYINGLDPEPLPLMDLCRRSIRSALGRQRLQDISSLPLPQSLKNYLQYQ

SEQ ID NO: 2398 - DNA, 2640 bp, Homo sapiens
atccgggaggacccgcgcgcaggaatgaatgcgagagctagggagtgagcgggcgagtgggcgggcccgacccccggcgcctgagcgccaacttcgccaagaacgctcctaactccaggccatcctgcagcgcagagggggcgctgctgccgggcatcagccgtgaggacgcgcccctggccgtgcggagagagccggcatttgcgggtcactcgggcgcccctgagtgggcggcggcggcagcagacccctctccagggagtccaggacctgccagcgctggggattcttcccgaacaggcgcttgccctctcttttatggagcttgggcccctgccgcagcccggtagaggctgtggaggtctaccgtccggaagcctggttcccagccccgtggcccattcctggctacggggagtggaggctcccacgaggtagcggtggcctgcagcggcctcctccccgcagtgaagcatgggccagaagctctcggggagcctcaagtcagtggaggtgcgagagccggcgctgcggccggccaagcgggagctgcggggtgcagagcccgggcggccggcgcggctggaccagctgttggacatgccagcggcggggctggctgtgcagctgcggcacgcgtggaaccccgaggaccgctcgctcaacgtcttcgtcaaggacgacgaccggctcaccttccaccggcaccccgtggcccagagcaccgacggcatccgcggcaaggtgggccacgcccgcggcctgcacgcctggcagatcaactggccggctcggcagcgcggcacccacgctgtagttggtgtggccacggcccgtgctcccctgcactccgtgggctacacggcgctggtaggcagtgacgccgagtcgtggggctgggacctgggccgcagccgcctctaccacgacggcaagaaccagcccggcgtggcctacccggcctttctggggcccgacgaggcctttgcgctgcccgactcgctgctcgtggtgctggacatggatgagggcacactcagcttcatcgtggatggccagtacctgggcgtggccttccgaggtctcaagggcaagaagctgtacccggtggtgagtgccgtgtggggccactgtgaagtcaccatgcgctacatcaacggccttgaccccgagcccctgccactgatggacctgtgccggagatccatccgctcggccctgggccgccagcgcctgcaggacatcagctccctgcccctgcctcagtctctcaaaaactatctgcagtaccagtgagccaagcctgatgggcagcacagacacagacacacaccgcagggcccgaccctcctgtcattcacagtcccatggcacataggggaaaggatctacccttctcctggctccccaggacactcagttctttcaaagaccaggatgtggtaccaactttggaaacgaaaggtctcttgccaacagtatctactgccctcgaggcagccctcccaagtcagacacctccttcggagccacagagagcctggagtctgcacctcctggaaatcctgccaccaaccaggacacagcagccaccgtattgatcagagagcctgtttccttattcaagagaatgaataaaacatttaggcaggagactttctattgtgtgccccgttgcagacagggccagggagaaattagccagtgcagggggaaaattgcctctgaataatgaatgatgaaagcctgacgccgtgcccctcctggcccatacgccttgccagggcggcaggattgtcacaccgttttaggactctgtgccactttgagagactgttcccaggaggcccaaccgcagacctggcaagtggacagtgcagtgtggagacaccttccggcttacctctttgaacgttgtttacctacccctttccacgtgctccccttcccagccactgactcacagttctctggatgcccagacacctctcttcagggaagatgagtctgactggtttgccccagggaagagcgtatccttaccattattttaagtagcatttgcattttaaaagaggaatgcggagaggacagtacttagtccaaaggtgctaacgggggaactgggggcattgtgacacccaagtctgatgtgtcctgggttggggggccttcctggagtgtcagggtctctgggcaacgtccattcagggtgcggcatggctgtcacaaagctttatttgagcaaattattttttcactttaggagacttctacaagtttgtttcctgtttcaaatgtgtgtgtgatgtgctgtttatttatcagcttgaggtccatgggggcagccttgtgactggaagggtggatatgggagacacattctctacctgctccgagcctggtcctctcgcaggaatgctgctgctgcctccgccgccactgctgctgccacctcttatatgtttcagacactctctgcccagactcatttttaactggaaatcatcacagcagtgggatatcagagccccagacagcactgcctcttcctccccaccccactgcccccaccttaatgtgaatttgactgatgaatgaagagcgtttctaataaagtttgtcattcagtccttcagc

SEQ ID NO: 2399 - protein, 271 aa, Homo sapiens; identical to SEQ ID NO: 2397

SEQ ID NO: 2400 - DNA, 60061 bp, Mus musculus
  misc_feature (1)...(60061): n = A, C, G or T/U
tctgttctataaattagaaaaacatgaaaaatttgagaattctggtgggattttctagggcattgatgtggcttttggcaacgacatgggttttgagctgtgacagtctaggttggaaagcccttactatttgagtgacttttataagtctcttaacttttgacaagctaacattaaattttaagctgttatctcctattcaaaggacaatgacatccagctaaaaagaaaaggcagggcttgagccatggaagtgttccatccaccccagctgccattgttgcgataccatgaaggggtgggtctaagatgggcttcagatgatgggcagctcctggcctctggatgtttctcagggacagagattgtatctgcaggcctgtgtctggctcaagagaattcagttctgggttataagacaaggcttacactgcatgtgagtctctttagaaccatacacgtacaatccagggatctcactgcagggaatactgtgcagtgggtaagcctggacaagtccaccaggaaaagctatctcgacctcctctacttccaccttcgcctccacagtccaagccaccatcatctttttcagtgtaaagctcttttgtcttttacatttcctgtcttaactgaaatccatctactggggtgacttgcattaaaaaacaaataaacgacgacgacgacaacaacacaacaaaaacaacaaataaaagctggatggtggtgtctcacacctttaatcctagcacttgggaggcagaggcaggcgatctctgtgagttccagggcagcctggtctgcagagttagttccaggacagccagggtttatacaaagaaagtcttggaacaaaacaaaacaaaatgaaacaaacaaacaaaaagcaaaccaaaccaaacagatcaggcagtccccagctctgattaagtctttcgatgactcgggagatgtggagaagcccctagaccacccaggtttcttgctggcaacaccagttccactttgaagctttgtgtcatctcttgctcggtggtcaacattcacccctcactgttttccctggccacttgtatgtcaggtgtttgttcagaaagccaaggcaggtacaagaaatgccacactttctttaaagtgaatgacatctactggaatctactacgctgtacttcttggatgtccctttccctgtttttttttttttttttcacccgttctctgtatactggctgccaaagatacacgtcctctggagttctgtgcttatactgtctcggggagacggctggaagggagagccaataactgacattttatagcagtacttctatccccaaggcttgatgccgtggagtctttagaaattctaaaaatttatttttatgagtgtcttgcctattatgtatgcatatgcatctcatgtgtgcagcccccccagaggccagaagagggtaaggaaccccctggaactggagtcacagacaggtatgagctggtatgtgggtgccaagaacgagcaggaagtgctcttaaccacttgagccatctttccaccgctgacaaatttttgtataaatattgtactgactactggcttcacagtgttttatatttgagggggctctgaggtatgagatgccattattattctgaataaaaggagtattccattcacgcagagaacctctccagtggtgcaaaggcaataaccacagacggagagcagaggtgactaacagctaagcaggattacaagcacacactaccatggcacgaagcccaatttttactggagttgggatcaaacttaggtcctgactaagccatcccctaattcttcagagataacttttaaatctgtacatttatgcaatgtctaaaagtagcttgggaatcttaagaatgccagttatcagagagtggagtatctgctcggggcataggcacctacaggctaacgtcactcagaacacgtctcaggcatgggaatgcgagtctgtggctctcttcatgcctggtttctgctgcctttcctgcttgtattctcaactactcgtgccaaagtagttgggcagtattaaactttgacagaagcaaaactggagccaaaggcaaacgtttaatcgacggtgttcaaacgcaagtgtgtgcatcacccgccgcaggcttccagagccgcggtctacattcctgggaagtctcagtttctcactcagaatgttttcatgctgtgctttgttggttaaacaaaacagcaaaacaaaacgaaaaccaagtgggcatatgcttttgagtgttgatttattgctaaagatctgcatttggcgacaggaaacatttttatccccatatgtttgaaaactccgtccgtgggaaggagcccggcatcagtttccagcgggtgggacgttctcgtggaggccctgtaaggccaggtctgtccacttcatctcctgttctttcacagactctgtggtgcctccgttgtcttgctcgggctcaggaagctcactctggaagggaagcacagccgtaacgaccatcaggaagtgtcttttctatccttgagatgggtctcaggtagcctaggctggccccaaatcttgaactgtgtttctgcgcggccggggactgcgctcagggccctgctgagatacactagcactctctcactgagccacactctcagccgatcacccccaagtctctttcccatcctcctttgcctcccaggagctgggattataggtgtggacctggtcctgcagttacttctgaaaacacaaaggcattaggaaagaaagcctccgagggcctgggaacagccagcaaagctgatatgatgctctaaagagagagcctaaacaaacagatggatagaaaatatcagaggtctgttcagtgcggcttgcttggaagcctcatgggaatgctggccctgtgactctggttttcttataaaaggcagtggggcaggagggctaagggcagagactggaggcccagacagccttcatttgctggcttattgggttgatgaggtaattcaaacccttgggggcttttgtttccactctcaaaaattggagaaaaaaaaaaaagagctttttttttcacccccatgtctctgccttggggacggggagagtaaggacattagatccagtgcatactgtgagggtactcagtactctagggcacacactgctgagtggctgagaacactgacaagaaccaatgctaaacctattgaaaaatgctttaagggccaatctgatttgctgatatgttctcaaatacaggaattgtatcaagaagaaaaaatgctgcaacaaaatgctttctttagtgacaatatgggctggataatggacactgacaatgtaacaggtgagagctccccctagtggaaagcacagtaaagactagctcacaccccaagagccattttcttacagagataagccatggctccagagttcaccacatgtatttctgtgcaattccctgaacttacactttgtgttagaaaactgatgctttcatattcaaagttaggatttctcacttatatttatactatgtggaggtatttttatttttaaaattatgttcaacatatggaacatgatacttggctacaatatgtacagatgtatttgaagcaggtccagtaaagtggttcagtgggtaaaggcactgcagacaacgctgagttctacatgtgtgtcatggcacacaggtacacacatacaggaaaaccccaatgtgtttgcacaacatgcgtctgctatgccgaaagtaaagtgagattcaacattctgtaaacagagccagagaactgtcattctctagtccgtttagaaatctgaccttaataactatctacaggtcacaaaaaataaacaggcctttgattaagaacgacttaatgtcatgctctctaatggcatactaggcttcctaaaatgatgtatcgtttgcttggtgactattaattcttgcgatgaatactaccatgtaaaactagacaaaacatgcccacccaacacaaaataccatacgcacaatatccacagggacaaattcaccaacagctgcagctgtctgcagctgttcctgccaagccgcagagtctaaccctgactgtgcctttggattggccacacacttgcccatctcagcacaatgcagctgtggggcagttctgggcctgagccctaagtgctctgcacttccctgttgctgctgaacctgaggctgaggtcccagaggacctgcagggtggtgtgtgccaagtgccaggcaccctacttcctggagacatcctgttaactggcagaggggctccagctagtctgctgcctgacactgcagcaccagcaagcctaggattagttggctgaactggtgtggaccagacctccccaataagaaataaaattatgaccaaacagttgttattgtaagccattaagtttcaggataatttgttatgcagcaaaagctaactgacagacacattcctttagaatcacaacactgtgtggatggaccacaggatcaggttaccatggcaccaggaagtcagcagagggacctcccccttcattccctaccatgtaagtgttccttaggtcttgctgtacggagctcagcaagtcacagcacttttcctggtgctgttgtggttttcctcccttgcctagatcactgcactgcagtcacatgatgtcccctggccctttcttctatcaggctgtctgtcaatgttacagaccccactttctgaaagacaaatgtgagctatggcagcttccctccacagacctttcatccctagatacctagagaaggaggtcgaagtggggcacaaacattttctcaaaaactatgcccaactttctgcctcctaattactaaggtaattgctgcccactgcttcaccatctcccaacgtgtttcaaaccctgggcctgctacactcttctttgctacagtaccctgtctagcaccatgaaccatctgattctttcttaagcattacatcttctctgcatttctactgcatgccaggcctccagccattctccacttgcttatccttccctcctgcttggtagtgtcattagttagtcacctacctctcttgatccctggctccaaacaggaactttatcttatgctcatatacccttagggcacacagtagactttggagaagtgattgttggatggatggatggacggatggatgggtggacagatgaaagcttacagactttgagctttgcttatgaaatctgacatactagtcactagacttgaggtaagtgtacttctctaatcctactcttttcctgccaaacggagacactaccacctcccctgtatggctgtcttaaggattacagataatgcaagccttaatttcagtctatggcttaaaactggtaataaattgtagctatgattcttattattttattgtcctgaacttgaactaagctgcgacttgaatatccactgaacacatcccacctcttactcttgaaagagagtgccggtgagtgagcgagtggagtctgttctttgtaaaacagcagtgcaggtgatgctcctggaagtcatgctgtgttagctgctcttccagagcgtgtgtcacactgtacagagaaagtccccagactctgtttgccttgttctttgttaggcctttgtaacatcaatgagtttttgtttttttttttaaatctacataagcaaaagtggggggttacttattacagaaggttcaacaacagccttttaagggagtttcctagagatcagcaaagaaaaggtttactgagagcttgtatgtctacaggccaaagaagaaaggcaaggttgcctctaagcagctggctgtgtgcctgcatcagaggggctgagagacggctcagtggttaagggctctactgcttttgcagaggacactgtttgtttttcagcactcatgttgggtggttcacaactgcctttaattccagctccaagggacccaacaccctcttctggcctctgagggcacctgtactcacacgctcctccactgtatcccagaccctcacacatacacaaatggaaataaatcctaagggctggggggatggctcagtggtaagatcaccgactcttcttttagaggatccaagctttgttccagcacctgtgttgggtgatctctaactacctgtaagtccagctccagggaatttgatgccttcttctgtcaccctccccatctgcacatgggtggcagacattctcacactatacatacatacatacatacatacatacatacatacataaatatatacatacacacacacacacacacaaataaaaacaacaaaaacaaaaaaaacccacaaagactggtaagccagcaatgctccttgctcctgggtgtgatgtgctaaactcacacttggcatccctctgggcttttgtggctccaaaaatccgggtatactccagccctggtatgacctgtattgaagctagttacaccaggcagtaggatttctgggccttagcatttcacttcccaccaacctccactaagtctcaccacattttctcctgagctcgaatcacaacctaccagtggaatggcgacatcctcatatggcagcttatcttcccgccaagcatcatcaatcaggtccaagatccttccatctcgctgtacctcactgtccatcctcctgcagctttgatcttgtcaggcctgtaagccaaagaggtcttttttttttttttcctaacacagtgaaggtatagtataatccaggactaggattcctcatacttccaccttgaaactggttttgttgctgtgcttaacattaccccaggaaaggcccatcttgtatgtgtcagatgacaacataaagactccagttctctcctcacctcagctgacatgcttgatcaacacaccaggctgctagtggaaccagagagcaacacaggtcttcagaataaggtcctagaagacactgcgtggaaatgtaactttcttttatctttaccatcttatacaatcacccttccctgcttgtgatgtctttgacgagtctctgacttgactcagaccgacttacctgagtgtcagctcctgctcttgaagccctcccctacgatttggcacaagtctccacccgtcttggcccaaacattggcagtctaaaggcacaggagctaagggaacagctgggtgacactgagctgggatgtgtgaagtgaccaaccataggccagctgctaactctcagggcaggaacaacgtggccagcagggcttacccaggaaaccacttcctttcttaaacagcatccagactgaactcaacagaactatccaagatcaacggtggcagctccaggttctctatccctctgggcgtcctcctttttgtttgtttttttgagagtctcaaactctctatagccaaaagcagccttaagcttccaatcttcctgcctccaccaatgggattgcaggcctgtgccaccggctctggttacagaaccagggcgttgtgtatactacagttaagcacactgccaaccgacctccatccccagctgagggggccctgcaggagtccagggagggaagcaaactgtcaggtgagaatgaaaactgggttcagactgactttatcagtcttgcttagacttggggggtctgatgctaggcggtttactccgaacaaacttaaacatagtatgatttggaagaaagtttcctggtgtaataacagtttctggtgcacaaggaggtgcaattacattgaaactcgacttagggtatgttatttcttccaagacgatgggttctagagataggctacctgtactagcttaagggtctaaggaaggtcatacaataacatagacatcatctggtctgttagctacttctggagcttagggaacccctgcttatcagggtcatttaaattactagccaccctcggtcctggttgtaggttgatgtggcctggcccaacagataacgcagatcaccaggctgtcaatcacttccaattcccagctttgttgacagaacaagttttatatctctcacattggaagaacaatcctgcatgcttaacatctcggcctccctggatatgtgagggtgcaagaacttttgtgctgtgatcccaacacccagcctacttccttcttgaaagaaacaatgtatatgtgtaagttcgtgtggaagtcaaaggacaacttggggattttggttctcttcttccaccaggcgggtcccagagattgtactcaggttgccaggcttggcagcaagcgcctttaagccactaagccatcttgctggctctcttcagtgcctggtccaagtgctcaggatgcttgctaagctcccagaccacagattgttccacatttttctcctgaaactgttgcagtctaactcagtcatcaagcagtgcttttgggtttctggcttccaagtttgttccttatcacaaacacaccctactgtgctccctgccacaaagtggcaacccaaggaaaggtcttgtgaggattagtaccagtggctctctcaggaactgttctgtttccgagagaagggagactcatacaagaaacaaacggtgccacgcggctatgtgcttgcctccaacagaataaaggcaagctagcgctatctacctagtctgtaggagggaaagggctttttaatttaaaaaattaaacaacctggggcctgggaggaggttcagtggagtgaagtgcttgctgtgcaagcaaaaagacctgaattcagattcctggcacccgcagaaaaagcctggcacgatggcacacttgtgttctctgggaagctgccaggccaggcagtctaactgaatcagaaagctccaggtttaagattcaaagtaataaaggaagacactgatgttgacctctggcctctacactcatctacaactccacctgtacgcagaaacctcccccaccaccacaactttcgtgtaagcgtatacacacacacacacacacactgaagctccctctgccacgttaaaaccaggtgataacttagcagttttcctcagacataaccagaccctagctagtggataacgcaaagccagctgaagggccacttctaatcacccctccggggtgtgacaagccttttgtttttgtagctgagccttgggctgcatttcacaccttctggtgctgactttcccagtccctatggattgcacctttttctaaagtgctctgactttctctccagcttttcagcaggctctgtccttgaatgctttgctgcttgcctcaaatgatctatgaaacaagtcaggtcagctttgtgactgactggcagggtactactgtctccagcggtaatgtaaggatacccagtctttccacaagctcgcctcaatattttgtaacatgactctcttctacatgcttagaaactagcacgcttttcacccacccccgtccctcatcacttatgcttggccgtccttccaaacacatctattttcctgggtcaggtgctcgggtgctcaccctttacgtaaacagaaaagctcccccgctccggataccagataatatcaaactctcagctctcagattgtctcctttagaccccaggctgagtgcagtcccaagagtccattccttcaccagtcccctagatctctgggcacaatacgtgacaacaggaggaaagcttgtcacattgcccggatatctctttctagacattagatgcgtacgtcctatgagacatacacacctttcatgcatacagctttgtaaatgtatttctaagctacgagcacggcgcctacactaaaatggccctcggaggccaccatccttggacactacagtcacccgctgcagcgacttccggttcgaggggtgggaggatactacatgcggaagtgcaaggggggaggtcgagcgtcgccatgggggctccgttccactccgcacagcgtgcagtaaagaagtggctctgaagctcggttgaaagtaccggcccgcgcctctggaagcggtggacgccggagttcgagggcgaacgcttggccaccctcggaaacccgggccgcgggcgcgaaaaacccttacccactgcgcgcgcgtcgccttcctcccggccccgcccttcttctgggtcacgtgactcgcggcgctctcaagccccggatgtgggtgagtccaagcgctgcggcagggggcgggacggacggcgatttgttgtgacttgcgcgcatccccgaccggaggaacggcgggcaggcccgggggcgcgctccgccgggggcgcgctccgccgggagcgcgctctgtaaccgaccgcannnnnnnnnnnnnnnnnnnnacgggcgagctgcggctaactgtggtgcggtctcggccctggccacggtggtgccgctaggctccaggcctcatggcccgcggccgcagctcgttgcggcccacctgccgcggggctttccaatgccgggttgcggctgcccggtcgtcgcgcccctgggttcctcctcctccctatgggactctgggctggccggccaggtgcttcggcctgcgggagggcgggctgcgggctgtgggctgcatggctcccgggaagggacccggctgctgctgctgccgccggtgtaggaccaggccttagcgttagccgcccagcgggaagcccgcagggttccttggtgatgttagtatgagaggtgcggaaatgtggcgggaacccctgatggcaggggaattgcagatggcttcacgctttcaagtcaagcataggaaacaagattggtggagtgaaagtttggaaaggggaattccacaacagcgctttcacgcggagacacttgacagtgaatgggcttttgtcctttacaaaatcgtggagttagtgcattctgatgtcagacctagttttcatttacagactgtagacttgttgccaaaagtgctccccattctccccaactagcgctggctctcctttgtagctatgatctggaacttgcagtgtagaccaggctggcctcaaactcagagatgggcctacctatgtctcctaattaaggatccgcgccacctcgcctggctttcttgaggccaatttagagtttcaaaaatgtattactttattatagctctttgtacaactcgaatatttgtattttatattttgtatgtaagtcagagatcaatggctatagttatctttagctttttacactttttttttttgttttgtttttcgagacagggtttctctgtgtagccctggctgttctggaactcactctgtagaccaggctgtcctcgaactcagaaatccgcctgcctctgcctcccgagtgctgggattaaaggcgtgcgccaccacgcccggcttttacacttattcttaaaggctgcagcttaacgatatgatgaaacgaattatcttatttggaatgcagcgccatttttaggttaatttttgtcccgtgctctctgtcttttactgtgtcgtcctcagtggtcagtatagtaaaggaggctgcgaaactaaagagggttagagacttaaaccacagacacatgtccctttaaaatgtgtatatgctgaagtttcagaaacaatggagatattgttaattatgctgctgctgcttcctcccgtggagcggtagggaccggttacttaggctttcctgtactgtgtggtggctgatggtgacagcattagtccacactgtcatagcttaaggtgctccccatgccaaaggctagagttgcttttttaagttttacaaaaaccacagtactatttttacatcagtacaaatttataaaaagcacacagtgtcagtgtccggtgagttcaggttcttcagctattccatatgtgcttgtaataccaaagttgtagacttgtagaccaaagtcctacagagaactgtcagctgcattcggttgctaggccttcaaaaccctctaatcaataatcaaaaccctcaatttctttctttcatatatatacatatatattatatacatgtattatatgtgtatatatgatattttctttatttacatttcaaatgttatcccctttcctagtttcccctctgaaaatcccctatttctcccccccccccaagcaggttcttacctcccgtttctttatcactcaggtttagctggttgtatatattttttaatttatgcctctacctcttctatgacctctccttcactggctaaatcttgaactacactatccagtgtggcagtcatcagccagccctgacattttaaatgaactgtttggttccccagatgcattagccacattggaaatgcccagcacacacaggctgcctagtggctattgtctgattaatactgataagatgtttccataattacagaaagttctgttgcaatacaatgatcttttgaaatacagtgttagattcagccttgatttttgatggcaggtacaagaaaactcaaaggtataggttttatattataaaaattatctgttgcgttcattgtcagggagacttgtaatgtctgagtcaccccactagggatgttagaattaagctgtgtatgtcggggttcctgtgctgtttgctcagttgagccaccatgaaattgcccaagagcctttggtcaatagggagctcttcatggctaatagtgcctgggccgattactgagtgagagccaccgtggtgctttctagtggcgtcatgtgcccagtgctgcttagctggcactcttatgatgaacttgccttccgcagctgactatcctgaagtacagtttgtacaggaatggcaagcaaaatgcttaactccgttcctttcttttcagactacagcaatgaattggtggcctagcaacctccaaaggtaacccaagggctccaccttaaaacaaacagatagacttgaatgtgtttaaatctgtgatgtagcaacctccaaaagtaacccaagggctttatcttaaaaaccaaccaaccaaccaaccaataggcttctatgtgtttaaattgtttgaacatataacaattttttaaaaagatttatttattatatgtaagtacactgtagctgtcttcagacactacagaagagggcatcagatctcatcacagatggctgtgagccaccatgtggttgctggaaattgaactcacgaccttcagaagaacagtcagcactcttaatcgctgagccatctctccagccccaacatttttttgatacctgaaattgttttgtttctagttagtaggaacccttcaagaccaacacttatgatcatttcctcctagttttgctttagctgggtttttttgtagtcaaggatgaccttgaacttaagatcttcctgcttcacctccccagtgctaggatcccggtcagtgctgctgctttcctctctgtgtggtagttagaaagcactgtcatcgtccctgtaaaagagcaaacctgctctgtagaaagttagctttatccctgactcccccacctgatcacttccctccgtaaaggcagtagttttcagtttgttcttcagtaaataagcacccaaaggcgaacacacttcttcttcttgctttgtagctgttttcaccttatcacaggcccctccacagagtatgctcttttgacagcttcctagtattccctcagtgaatgagggccctgttggccctatgttagtatttgaccttagtgctaagcggtggcagatcatcaaacactttttgcttaagtctgtattgagtattaggaacacagaattctcagccacagtcacgtggcaccatcaaagaggaaacaagacttattgagtaaatgcaggccatgttggttagggacagagtcactgatgtggctgtgataaatatctacaggaaatctcagtcctccctgtgtattggatcctagagaagggtagagtgtttaagttaaagaaacacactccacattagccgacgtttttcaaggcatgttactggtcatctgtgcctgttttaaactagaattcctttgtctcaatactaggatttaagttttgagcttttcttatagctgagtagttttatcacagtgctgctgccacctagtggtgattaggcaatatgcttcagctttattctgttgccctctgagatcctgttaaccataagaaggcagtgttaaccaaaagatggcacattgcttgggtctggagggtcacattatctgggtttgaacttaaggaatataacctatagctttttataatcaagccgttctccctgtttcatcaaaggggtagcacctgccttttacaaggaagatagaacgtgtaagaggcaggtagataaagtgaacattcactaaagtttagcatatattatacacgttgttagttattaaatagtgtcatacataaatgccaagaaattatatattattaaataatcactgtttaagaatggcatgacctgctgggcggtggtggcgcacgcctttaatcccagcacttgggaggcagagaggcaggtgggtttctgagttcgaggccagcctgatctacagagtgagttccaggacagccagggctacacaaagaaactctatctcaaaaaaaacaaaaaacaaaaaacaaaaaaggcatgacctaaagaggtgtatttttagtaggaattattttgagaaataattataaaaaagatgaaataaagaccttggcagttactattcatacccttcattttgcagatggaaaagccgaagttcgaggacacagagctggttagttgcagagcagaattgttttctgggcgtctgtctagtgttggctcgactgcttcccagttctggagcagagcaaaggctgggttgggttgctctgtaatttgacccttactgtggtttagaaggaagtgtagtaaaacgtggagtcctctccgttaggattttactctgggtcatggtgagctctatcaggaacactggttggaggaaagagccttagccaccctgtgcaagaagagccagcagtccttgctaggacatgtagagataggtgcagttagaacacactagctgtccctctggtcttctcagcctttctgtgtctctagaatcatctgtgtgtcttctgtctgtgcattcattgccaggggatgttgaccattttgtttcttttttagtcccacattgggctatttcttggtaaggagtatgtcttttattattatgtagagggctgtttgtacaacactaaactgttcaataaggtaatctacttctcagagaagtagattacttctggaaaagcattaggacagagggacccaatctctacatcgcaacttttggccttgtctttaattcagaattgaattgaaactttgaaaactgaggaaaaaggactgtttcttttttctttttaaattttattttatgtacatgagagttttgcttacatgtttatctctgcactataaacgtaacttgtgatcccctgaaactaagtttatggagagttatgagctgtcatatgggtgctgggaatcaaacctgggtcctctgcaagaataacaggccttctttccagcctactggggcgctttcttcagaatgaaagatggtctctgaaagaacacattgaggatttctgaagaagagaaatttatcatacaactctcgatacttatgagtttaagggttattctttctttatggtgtgaatttctctgtttaggcagtcttttctgtctcctttcattttccttcgagatccttcttggcagtcctgcatctgtgagcagtttgcttaagggaagatgaagtttcccaaggcatgcagcagtgccctgttaaaatctggtctcagctctggacctcagagatgagtgacattggttttctgtcactgagaaaccaatagcttagaaagaaggaggaatatactaaacctttattttccagttctatataatttggcatgaagggtgggggacgtgtcagcagcagtaattgttgtgttagtgagaagtgctgctttcccttcagcagtggtcctgggtgattcctctcaatgtgtagcagggtttgtgttaatgtcccttgagagaaaataacttttcaccctgacattctttaagaactaagcattagaggggctagaaggagggctcagacagtaagaggatatactattcttgaagagaaccagaatttggttcctagatctacatctggtggctccattgcctctggcttccatggaccatacttaaaaaataagtcttgactacaacaatagaaagaaagccaggcctggtggcaaacacctttaattctatcactcagaaggcagctggacatctctgagttcaaagccagcctggtctacatgcataactggttctagaccagccagggctacatagtgagacatattgtgtctaaaaaattaagttaaacaattaaaaaaaaaagcatagggtaatgtgatgtttcattggttttgtaggatagtttcagcagcagttaggattttgtttgcttttggaatgtatttggtgctagcattgctaaatgataatccttgcttctacagacttcttaggctgctttgtatttctcactgtgattgcttttactcaccctaacttggaatgctggaattcagaacagtaatttttctcactcctcttttctttttcttttttcccctagttgccaaaacaaagaggatttggagatggaggctttgttggaaggaatacaaaatcgggggcatagtgggtaagtttgcctttgactgtgagctcattgcagtttaaaaacctacctgggttctgttagaccaaagctacgctgagctaaggcacatttgtggacagcatccctccgacatcagttgccttctctcagcattactagggaggactgtggctcctatcctagcttgagttttccccttcagctcagatgggtatcagtagcttgagcagtgaggtaggttacagtgtgttccaaataacagttgggagaaataacagcaatagatcttgctcaaggatgagtttcttgaaacagctcttctttgttatcttttttcctgcataatatagcctgtttgctactaagactgttcattttggctgaaagagctgcaacacaggcttgcctggattctcccaaaagaatcccttaaatatcccagaagatgtggttagtagctctgaaatctcactttgcaagccagatgtaaagcatccatctgtgtttcagcaagtgagcctggttttaggttactcattagaggagggcaaaatattgtgtggagttaagcagcatagcatatgacagcaaaggcccaggcaccctgggcttggcttctgtaatgtttcagttctccagataggattagtctgtgatatttttatctgtgaaataggagaaaccacttgggcatgagctgtgactggtctgttggtgcttgtaggggatttttgacatcctgtgaagcagaactgcaagagctcatgaaacagatcgatataatggtggctcataagaagtcggagtgggaggggcagacgcacgctctggagacttgcttggacatccgtgatcgggagctgaaggctctgaggagtcagctggacatgaagcacaaagaggtagagcggctgcttcacttctcttgttatcttgactctggctttaaatcatacatggttccatacacccatgttcatgcatgtatataatatacttggagcaacccatgtccaaacctttaatccatctttgtggtagtttaatcttttatgctaaaggtgtttcttaagtgtaagcatttgtttaccaagttaggtttgtttgtttgtttgtttgtttgtttggggtgtgtgtgtgtgtatgtatgtatgtatgtgtcttcaagacagggcttctctgtgtagctctggtacttgctctgtagaccaggctaacttggaactcagagatctgcctgtctctgcctcctgagtactgagattaaaggtgtgcgccacaaccgcccaatcttattctaattgttaccttttcttcttttttcttttctcttcttttcttttcttttctcttcttttcttttcttgttttaagatttattttatgtgaatgagtattttgcctgcatgcacacatatgtgtaccatatatatgcctgatgtcacagattctctagaactggagttagagacagttgtgagctgccatgtggagtactgggaatccaacctgggtcctctagaggagcagcccgtgcttctaaccactgaaccatttctccagtcctcttagggtttcttttagaagacattttattatggaagtataagaacattagtatttgtttcagggagcattttactttggaaacatataatgcacactgtatttaagagagtgtcagtggagaccagggcgtggctttggtggttaagtgcttactgtgcagctctaagaccctgggtttgcattcccagaggtcatgtgatacagccaagcatggtggtattcatctgcaaccctagcacacaagaaaatgggagaaggcttgcataatctttgcataactttcatcatattacatgtccatattaacatcaccaggtttatagtataggttttggcttcacttgtaaagttaggtgacagcaaagttgaagatatagggacatggtgtagcagtagagtgcttgcttagtatgctgaaagccttaggttcagttccagcattcttctacccctctacctcccaataaatgtaaaagttgagcccttgcttttgacagtcagagttaagcaggtcaaggcaggagaagcagctcagtgatggagtgtgcttagcatgcacacagtcccggccaggaccatcagccttgtaagcaaagttaaggaaacccactcagacagaccttttttaaaattagggagaaggaaaatcaaatcatttctagtctcaccaccactaatattggtagtgctggggggaggtttaagactagctcctgacttagtcctcataacttagtggtgcagtagaagaagaacactgaatcctggaagggaagcaggaagcagtgtaggtggaagcattgtctctgagtttctatacagattagtctgggaagaatacgaaccgtgggtaaatgctaaccctaagcctcacgctcgttctgccagacttgcctgcgtggcacttgcccttctgaaggccaatatactaccaggactgacaacacaaactgtgatttggttagtgatgatactgtatacatgtgtgaaattttcaaagagttaaaaagttatcgcccagtgagtggttggccatttacacttagagtcaaataacactttagtaatgccagctgtattagtttagatttctgtaaatggtatttgctaatctagagtttaaagtttaggcaaatcttttaaaagttttttttgaagttttattttaaaaaaagatttatgtatttattttatgtatatgagtacactgttgctgtttttagacacaccataagagggcattgtgagccaccatgtggttactgggaattgaacttaggacctcaggaagggcagccagcgctcttaaccattgagccatctctccagcccctaggcacatcttttaagaacacaacttacacagagacaggaaggtgataaggaagcccagcaaatgatagccacgctagactgcaaagacgaaacagtgtggtgggctagagaaacaggtcagtgggtaagagtactggctgttctttcagaggatccaggctccattcttaacacccacgtggtggctaacagctgtctgtagtcccagtctcagaacacaccttcctctggcctccatggcaccaggcattcgatgtggtacacagatacacacaggccaaacacccatgtggctctctgggtctttactgttccactgcgcttgcttctctcgggaccttgtgaactgttcacaccaagtctagacgtagcagggtgaggatgggcgaagtcagcagcttcctgttgctcacagagacagaaacagagctgtctgcttccttagtaggttcccagtgacagctccggctgcttactgccgtagtctgcccaggaatgggccgttatggctcttccttccatctcctcactatgctttccaaggtcactctcctcatccacccagaagtctactctcagattgcacttctaggaaacctcaaaataagaccaaataatatagtaagacagttttaaccttccttataaatctgtaaaaattaccagggttgtcagtaggaaataataaagccagagtcatgcttgagagttttaacacatttttctcagtaactgatggagagcattcataaagatacagatttgaacagcatgatcagcaaacttgacccagtttataactatagaactcaacacaagagaactgcagagcatgcatttcttctgcagcacaaactgaatgatttccaaaaatggctctatcctggtccatgaacaaagttttgaaatcatagataaactctcttaacatagcagaagtaagttagaaaaagataaccttgaaaaaaatctgtgtatttggaaattaaataagttatgaatgacccagagaagtcataatagaaatggaaaatagtttgaatagtcccagacctcaactctggaactctaataatccaactgtaagtagccatacagctttaaagtgtaccaagcagcacaggcaggagatagggagaaattatgtccatggaacctatagaagtaacacagctctcttgctgttgatagaataagcgcacggaaaggccatttaaggtagagtgctgatcagaatcaacttgacctagttaatcttaagtgtgttcttcttaagtgactgggacattttactgcagtcaggcggctatcaccataaccagcagattaagttgtatatttttatagcaaagtagatttaggctaagattcaacacaataaaagacaacttttcaagtacttggaaattaagcaatatacttaatgactgtcctgcttttaggttggaatattgcatcagcagatagaagaacatgagaaaaccaagcaagaaatggccatggagtacaaggaggagttactgaagctgcaggaggaagtgagcctttcattgtgtgccgtgccgtgaggtgtagtcgttctctttctgtaactcctgactgttgtgttgacaacttgtttctgatttcagtggtgagaactgcacagcctgtgtgatagtctgtgggaagaatgtggtagaaatatttttctctgaccttgaatctaggtaaagaatcttgtccaagcatgtttgctagtacctaggccagcagttggctgagaggaaaagagttgtttatataatattgaaatcttgataacagaacatttaatctttttttccaagacaggatttctctatagaaccctggctgtcttggaactcactctgtagaccagactggccttgaactcagaaatccgcctgcctttgtctcccaagtgctgggattaaaggcatgtgccaccactgcctggcaacatttaatattttaatttctaagtttatattggaagatacaaagcacttagaaatattttgggagccatgaggtgctggtgcacgcctttaatcccaggacttgagaggcagaggcagatggatctctgtgaattagaggccagcctgcctggtgagttctataattgccaggactacacaagaaaccctgtctctaaaaaccaaaaaggaaggaaggaaggaaggaaggaaggaaggaaggaaggaaggaaggaaggaagaagaagaaaggaaagggaaggaaaggaaaggggaaaggaaaggagagaaaaaaaagagctgcaaaaagcaggggtcgtaaaatggctcattgggtagaggcacctgccacccaacttcatgcatgaatttgattccaggaacctacatggtgggaggagagacccagcttcagcagactgtcctctgacctcctcttgctgggctgagatgcacacacacctcctctcctctctcccctaataaaaaataaaaatgttttcaaaacacttttttaagcaagaaaattgggaggcaaagctaggtgagagttgagagtgtactgttcgtgcagagggctctgggtcagttcccagtaccatgttaggaagctcagaacacctagaattccagctagagggctcggacatcctctctggccttcttaggcatctatctgcacttgcatgcatatacctacatagagagaaacacacataactagaaattaaaaataaaatctttaaaaagaaaattctattttcatattcaatgtaatttttaatattggggaaattacttttgttttggcttaagtcaaagtctcctactgaccgtgcatcatcagtgccctcaggagtatgtcttgagaaccactggctcagaggggaacagtcactgcttcctctcttctgtggagtgggtcgtggaggggcatctatgaatgcatggcaattgccattaaactaaattttactttttcttttctggactggaaatttcattacttttataaatttcatttctttctctcacatacacatgcaagcaggcacatgcactttgagacaaggcagcccaggctggcctcaggttcttcatgtgattgaagatgaccttgcccttctgtttctcctgccttcacttagttctgtgatcactgcaccaactcccacagccagtctgtgtggagcttggtccagcccagggccagcgttttccaggtcagcgctctaccagctgagctgtagcccagccttgtcgtttttatgtcttcttttattttgctttgcagctctaagatgctgccaatctattttcaatagtgtaatttagcagtgctcttgctgtataatcccaattcatctgaccactacagtttgctaactcttaaataactgtttttacagttaagcagactgaagagaagctatgaaaagctgcagaaaaagcaactaagagaatttagaggaaataccaaaagttttcgagaggatcggtctgagattgagaggctaactggaaaaatagaggtatgtctacagcaatagtcccagttgaaacggcagttgtccattgtgtaggaaaatgccatttctaatggagctgttttctggagcaagttcctgctatctcaggggctgccactgaactagtcagtgtaggatggcggtccccatcacatgctcccctgtggctgatgggcttccaagacatcaattaatctcaagagtgtagagctcccatacagagcacttggaaatatatggaggttttgttttgtttgttttttgttattattttaaaatgatggagcatgaaattggcattcatggtagaggtagcagggatagccaacatgtctgggacagtatcctggagaagatcctagtactcagtacctcccattctgagaaacacggagcatcagttagtggcagcatcctaccttatctctgtctcctccaccccgatcctgtaggtgttagtgaccggggggatgcttggcttttcttgtagagagtgctctgctcatcaggtgacttcctttcagttcccatttaggtagagcatgagttacaatggattcgcctacctctctgattttgtttttgttccataactctgtgattactgataggagacagtgagtcccctctcttctccagtacattgaaacagtcactcaggattgtgggaactaaaagggggaggggaaagagggggaaggaggatagcctgcgctggccagagttcctcctatgctctgggcaggcggatgtgggagggctgccagacgctttccattcgctttccactcgctttccaggtgggcatctaagccactgaccccactcgacgggggcgggggggggcggggggtggacaaggggcagcccccgaaaccagggggcccagagcaacaccctgcagccccggggttatgggagagagggcttaggggagaggttcccacacaggcgagagtctgcacagcgggccttgaagaacagagacagtttatttagagctttattatagaaaggcagggggaagagaggaggtaaaagagagagactggccatggccaagaggagagagagagagagagagagagaggagggagagagaaagagagagagagagagagagaggagagagagagagaaagagagaagaagaaggaggaggaggaggagagagagaagagtaagagcaagagagcaagagaggagtgagagagtgaggaggggctaagcagccctttttatggtatgctgctatctttactgttgctaggtaactggggaggagtttagcctgaaggtcagaagcttgggacattgcctacatgactactagccacgcttctcttatggggggctgagggggtgggagccagggtcccaggagacatgagagaactccttctgtcccatgtaggtgaattatcaccaccaggacccggggttcaacatctagcctcaactggaaaccaggctgtctgtgcatagcccagtgccccacacaggatgttttgggacttcagagtctgatccagtagtaggcatgggacctaggaatctataccttacctaattaagaaactgttcaatatcattgtgtgactgcttaacaatgttgtatgagtgatctgtcatatagaaatgtactttatatacatgtcttatttagggtttcattgctgtgaagagacaccctgaccaaggcaactcttctaaaggagaacatttattggggttggcttattcattcagagctttagtccattatcatcatggtagaaagcatggcagcatgtaggcagacatggtactgcaggagccgagttctacatcttgatctgcaggaagcaggacattggacttctacactggatgaagcttgagcataggagacttcaaagcctatccccacagtgacacacttcttccagcaaggccacacctactccaacaaggtcctatctcccaatagtgctactctacatggaccaagcattcaaacacatgagtctctgggggccaaacctattcaaacaaccacaatactttactttatggaattgtaatttctatgtttaatattccttttatatttcaatatttttatagatttagaacttagaatcagaggaccacacagatactgcctctcctccagcctctctactgctaccatttcttctagctcccgcacattctttttttttttttttttttttttctttcaagacagggtttctctgtgtagccctggctatcctggaactcactttgtaggccaggctggcctcgaactcaaaaatccgcctgcctctgcctcccaaatgctgggattaaaggcgtgcgccgccaccacccggcgctcccgcacattcttatcaccagcctacaccaccaaccatgagcacagagcctcggtagccatcctctggtccaggttacttcactgactctggattcagatcgttgttatctttaaaatccttgtcatcataacctttgagagtttcatccacagacatagtgctgatcacgctctggccttggagtttcctggagtcctttcttcgtagctattttgatctccttgtgtcatccacttactcctgttgacattcctcagttcttacctttatgaaattgctttcagtaagatagtcaacccatgagcatgacaagccttgccgtccttggtgtcttctttcatttctttctttaatgttttaaagttttcattgaagagattacttccctagttatgttatttcacacgtgtgtgtgtgttgtgtatatatgtatgtatgtgtataaatatatgtgtgtgtgtgtgtgtgtgtttatttaattctgcagtattttaaagttgttatgaatgagattgctctcctgagttctttctcagggtgtctgttattggttatggaaaagctactgagttttgatgtgggttttatgtcttgctccttttccgaaggtgtttatcagttctagaagctgttgagtgatggtattcagagtctcatgtatgaaccattttgtgtaaagaaaggatcatttagcttctttagctgtatcccttttctttcctttttggctttctgttctaagactccaaacttgagtaacagtggaaaaagtgtttgcctttgtctgtcattcctccttttagtggcagtgctctgggcttctccccatttagtgtgttgattataggcttgccatatatgtccttaattatgttgagctgtacttctttgtgtttgtttggctttttgagacagggtttctctgtatagtcctgcctatcctggaaggtactctgtagaccaggctggccttgaactcagagatctgctcgcctctgcctcctaagtgctgggattaaagatgagcaccactgccacctggctgacatatagcctttttaaaattgattctttgtgaatttcacatctgcaccccaatcccactcatctccccatcccttcctcccccccccacccagtgccaagaggaaacaaaaataaaaccaacaaaacaaaaaaccccaaacctctccctgtgggagaggcagtgtgccatatagtatccccttttgtccaaacagctacacttgcaaatgttcattggagtgagtcattggtccagtttgagccccctggcttatgctacactatcaatactggattgtcaattggacttgtctcagatatcctgttgttactctgtgtcatggagatgtccagccttgaatctgtaggaccaggccccttcatgggttacagcagttcacagatgggatagatgttggggttggccaactcagagccttagatctgggcctggtatatggtcagcctgccagctttcctgtgcccgcaccaccagggccagcgctcctactttactcaggtgatttggcagctggcaaggggtgggattggctgtcctgcactcatgccattggaatctacacccgtgccaccagggccagctctccagcattgtcctgtgaggggtaggtccagcttactctagtgtgtagctggtgatgggtggagatatgaactaactttattgttagttttttcaaggctattggattatatcagaagtcttttccgcattaactaagaggatcatgtgatttctgttctattaatatgataaatgatatttgctaatatatagtatatatcataatttgataacattaatatgtatgttgaaccatccttgtatcattgtaatgttacgtgtttggtcatagtggatgatctgttctttccctctaaggcaatatttgtctttacctgtaaggtatgtttcttgcaagtaacaaatagattgatcctttgtttgtttgttttgttaagatttatttatttattttatatatgtgagtacactgttactctcttcagacataccagatgagggcatccaactccattacagatgtggaataacactgactgctcttctagcacatctggaagagcagtcagtgttattaaccactgagccatctctccagcccctgattcttctgtcactacctcctcagcactggaatttcagatgtctgctgccatgcctagcattctctagtgagctggcctatatgcttacatgccaagcattgttcacataccgtgtcatcttagtagctcttagattgggccttttaacaatgtcctgtggatcttgtcatttcccttcatattttcttattacctttgtcattgtcttcatgttctaattcatataccttgtctttaggccctgaaactctgctttctatttggagaggctttccattgagcttttagttgactcaatgagatttttatttacaaaatttccatttgatttttttcagtatttctgtctctattgaatgcctcattcatagcctgtattgacttcttacttcatgcagatgcttgttggcttccttgttgaattccttcaaaagtctgtttatgttgtttgatttcattgaacgttcttacttattcattcattcattcattcattcattcattcattcattcattcagtgtgcatgtcatgtctatcacctccacttgaatggggctgggtttcagtttattcttattaaatgctattcctgagtcagtgctggcacatgtcatatagacagacagactgtgagtgaagggactatcagaaagctgacttctcacttagctaaggagctctggagctcgagatccctggcggacaaagatggggaggctgaggatctttccctttgagttgctttattttcagaaaagttgggcccattttcatgacgtagagtttgaaattgctgttgattacctattatttttgaattatttgactctggattataagtacctgataaaatgtgatgcatattttccatattattcaagcttttgcaattctacgaaataaaaaattttgactatcaaagatactattattggcaggataggaagtgagaatcaggctgctgagttactggtttagaaatctgttccaatctattcagtttctgggtctgaatgttagaaatttagatggcaaagggaatattattattttagcgtcacttttctaaaaatacaaaatggtaacagcccataggtggcagcagatctgcaataatgctcttgagcccactgtcatggccgtttcttcctcttcaccactaagtgttacatttagaaagacagacatgtagaggcacagtgtgagcaggatccagtcctcctttgcagcgtgagtaatggggctcctgctgagagaagggcgcccagggagcagggcgctgtgcaagcctcacagcctgggagcacttagatgttaagtacttcacttgcctccccaggaattccgacagaagtctctggactgggagaagcagcgtctgatttatcagcaacaggtatcttctctggaagcacagaggaaggctctggctgaacagtcggagataatccaggtaggcttaagctgtccgatgcatggctattgaccgaatcggacttactgccatgctctttctgtcttacttggattctctctgtagtctttgtgtggtaagcctgccttcctctacttgtggcttagcctcttcagcatctaaaacactctaaaacacttcagttttttctttctttttttctctctttctttctctcttttctctctctctctctctctctctctctctctctctctctctctctttctttctttctttccttttggtttttcgagacagggtttctctgtgtagccctggctgtcctggaactcactttgtagaccaggctggcctccaactcagaaatccgcctgcctctgcctcccaagtgctgggattaaaggcgtgcaccaccactgcccggtgagtttttgtttattcaatcctcattttattcatgtttattgactattatctttaagtcactgctatcaatttactattgtggttaattccatataatgcaaacttcactgttagtaaaagtggagttgttatttaccaggcagtcaactagagatagaataagataccttgaaagaactgacatctgttgtgcccactaagggtatttgaataatccttctcatagttttatttaacataaagttatctgattagttaaaagtattaggtataaatgtctttctctttttccttggcaaactaaccaagaatgaaagcttcctttaactcagtttgtgtccatcaatgctgtgttgttatctttactaaacacttattaaatctctgtgtgcccattacttagtgttaatgattgtcatcatcttgccaatcttgtatgtaaatgagcattagaaattcataacagaaattatacctcatcttcttttcgtgtggtattgaacccatggcttcacttattcttggcgaatactgtaccagtgagctaaatcttgtgccaccctgactggctttctgagcgcagtagtgttgacaacatgtgcacattgttttgtgcagctgttctttgagacttcttccttttttgttttaaagagggacatggcattaaaaaaataaaagattgattttctttgtattggtatttttccttgatgtatatatgtgaccactgttacacagtgccacagtgcccgaacagggcattgattctggactggaggcatagatcagtgtgaggtacagggtgaatgctgggaactgaactctggaagagtagcccatggcgttcttatccagcccacttctttcatcttggaaagctaaaactgggtacacttttactctttattttttgctattaaaatgttacaaagcaaatcatggcatcaactcatttttgaacaggcaaggacttaaaatccctataatatgatagggtaacatcaataggataaataatagtaatataacttagtattcagtctgcagttttatccagttgtctaaaaactactctttcacagtggctgtttgaggcagaatccagttaagcttgactaattgcatttaattgatatgtgggacagcagaaaatccgagagtctgggtaaatgttatgagaaaaaactgaaaaaaactctttcatatttttaacattgaagaagattcaaaaacagcttcacgcactttgagtcatgtatttggattcatctatgcagctattagagttttatactccatgcttgttttagggaaaaaaaaaaaaaaaaaaaaaaacccgagaacatcctttgcctggcttttctttttcttttttcttttcttaatgtagttttggagcttcaaggaaaccattgtcacaaatagattgcttaagaacagtggggttggaggcagcaaaggctttgattttccactgcagcacgagtacctgtctgcccatctgggtcgccttcagatgcggccacgcaggccatagcatccctgtaggcagcagcctgaggatcccacaaggctctgagttcagtgtgcaccatgcctctgcggtgtctgtcacctggtgcgccttgacagaagtgccttctgtctccctaaggcaaattgccttaatggtttccttactttcattgccctttgtgtagtgagataactccacccttctgaatgcttagtgaagaagggcatttctgctttcttgaaagaaaatgtatttgtgcatgaaaatatatatttcaaatatatttacctttaagtgcttctaaagctggccagttaagaggaggaattttaggagttgtttctgtgattttctgacttgcttaggattaaaagaggtatttctgaaattagtaccactgtagcaatatgtgaattacacagtttactattttgtgcagttagattaaaaaggtgaaaagaaatataagattaatttaatatattaatatataaaaattaatatattataaattagtatatattatataaatatataaatcaatatatttaatttaataatatattttatttaacccagtatatcaaaatattatcagttcaaaatttacattcttttaaaaactaagtcattgacacctcactgtgtattacacagttagaacattgttcaagtcagactagccacagctcagtgctcagtctcttattgccatagtagacagtagaacttgggctatcatttcttttttttttttttaatttttttattaggtattttcctcatttacatttccaatgctatcccaaaagtcccccataccaccccccccccaactcccctacccacccactccccctttttggccctggccttcccctgtactggggcatataaagtttgcaagtccaatgggtctctcgggctggagagatggctcagccgttaaaaggctaggctcacaaccaatgggtctctctttccagtgatggccgactaggccatcttttgatacatatgcagctagagacacaagctccggggtactggttagttcatattgttgttccacctatagggttgcagttccctttagctccttgggtactttctctagctcctccattgggggccctgtgatccatccaatagctgactgtgagcatccacttctgtgtttgctaggccccggcctagtctcacaaaagacagctacatctgggtcctttccataaactcttgctagtgtctgcaatggtgggctatcatttctagttaatgaagatactgtgtttttgcatgagtgaaatagtagaataaaagaggaccgagactgattctaaagtaacaaatggagactacctggttacagagttgctgacacagctaaagctccagcattgaatgcagaccacagtgtcatacagtgtcgcagtgctgaggttttgggctatgtgcctcctggccactcatttggacagcttttcccagctgtgctctgtgagctccagggctggtgggcaggtgagggatggggtgagctgaggctcagcaacggagcacagccattttctcctcctaccttcaaccaatctctacatttacttattgtgcagaggattctgtataagatttcctcttgtttttgaaagtcttctgccaattgcatgcatagtggttagcgttgaccctgtcctgaatcttctttcacgtgccattctagggatctggtggaaaacaaattgcctctactctgaggccttgagctctaatttacacaaaattatttgtctgtatctttgcctctccctttttgtttccgtttttttttttttttttttttttcatctttgtgtcaccatattgtaaggcaaaagagtttggtcctcagttatgtacagcagaatctttaaatctgtagtagatggattccacagagatatttctgcttgaatttctaaaatacaagtgggtgcctttcctttaggaaatgtttaaaataagggaagtttaactttacaaatgatttatgtccatttttaatgtatagataaaaaaccagtctggatactgaattaaaacttgaaaaaaacagaatgtgagaagccaaaaacacttcagctggcatgcagagccaaaaggttagacactgtactccacgggtcctgagccagttgctgaagtggctttatttgaatagacttcagtaggatatgccactaaaagaaaatgtccaaaacctgctgatagcccagccttcctaggagtgaatcttttctttcctcagtgaatacaattattgattattcttctatcaactctcttttccctatatgtttttaggctcagcttgccaaccggaaacagaaattagagtccgtggaactatctagccagtcagaaattcagcacctgaacagtaagcttgagcgggctaaggacaccatctgtgccaatgagctggaaatagagcgccttaacataagggtcaacgacctgatgggaaccaatatgactatcctgcaggaccatcggcagaaggaggagaaactaagggaatctgagaagttactagaggtgtgtgttagaatgagtaacttagggaggtatatgcatgccctaggactaggtcctggatgcccagcttcctccttgggctgaggctggtggctcagctcctgatagctgtattcatactgtccttgtcataaaacttgcagtcagccttcctggttgcttttctcatgaagtagaagcattgaaatattatttgactttttttctggagtattttgcagtctctgcaggaaaaagagagagctaaaggaaagttgtaataatatctgtcttttttcttgagtgttttgcaggctctgcaggaagaacagaaagagttgaaggcaagtcttcaatctcaagaaaccttcatccttgaggcaaaaatgcaggagaaactgcaaacgacattaaaggcagttggcactcagcagtccgtagaaaggtctgtttgaaccgtaaatgttagtctgctggcctgtttgacagtttggcattgaatgctgattttaatatcgaatattttcatttctgtgtttgatcatcttgtcttatttgactttaatttatgagttagatttttattgtcttaaaatttgtatggatggttttgtctccttttcatttaagtctctaagattctgaggatcataaggttggaaactccttatctctctttgttagacttggagggcctctctgccttagaagactaaggtatggtggaaagtagttgcttgccatcagtaacagcctgtcacttagctagccctttgggaactgactttattgttatcattattattgtattattattactactactactatgttttgaaataggattttatgcattaccccaggctaccttcaaaattactgtgcagttgaggatgaccttgaactcctgatcctcctacctttgcctcctaagtgctgggattatcagtgttgtgaccccacccagtctcagggcttcctgtatgccctgggaattctctaccaactaagctataaatctcccgccctgggctattgctagggcagggttatagtaaaaaataatagagtaaatgagcttccttttgtgtaagtcaggcatgcttctgttcttgccagactgtcttgtaaagtttttctgatagaaggattcaagtgttaacaaaatggttttgctgttttatgcggcttttccccttgaaacacaccccaaaccctagtaaagattaaattgctgctgaccctggattgttctccaggtattccccctcctccccaaagcaggctacaaactgacctgttctaaggagcttagttaaaagaatagttgggacaacagcctggctggcattgtttgtttgccaggataagagagagacctgtttccccctccttctgttcttaggcctctggaggactgtcagaaggaaaggaagtacagctctccagggcaaggagtcttggataatgtgctctcccagctggacttcagccacagcagtgaagaactcctgcaggcagaggtgacgcgtcttgaaggcaggtagataattagctacacattgaaaatttgaagttgttaggatgaactttgattctcacattgattgagtaaaacagtgcattggtgaaatgaagttgttttttctctagcattcacaaatggcctcactccctagttcattgaaaatacagaagacactgtcctaaccttctgccagttggccttcatctgagcctgtgctctgtggacgtgtctgaggctgacttgctcctgctgtgacgtcctctttagggctttcttcagaatggtttatatggacagaaagtattctgggagctttttccattttgaaaacaattaaacccctttaaaccatcagaatatttcctctttctctgttcttcagagtcaaaatctttttttaaaaaaattatttatttatctttttttatatgaatacactgtagctgtcttcagacacacaccagaagtgtgtgcattgaatcggatcccattagaggtggttgtgagccaccatgtggttgctgggaatcgtactgctgacctttggaagagcagaccgtgctcttaaccactgagccatctcaccagccctagaatcaaatttttgaagacttgtgtattctgataattcccacttcaccctttgccttttaggccccattcagttcagctttcttctgtattccctcactgaaactgttcttggagaagatacagtgggcatgtctttcttccttcattcttgtttatggtgtgatttagattttcttggctttgaattgaatgctagctaatggcaaatctatagtatttggtagcatagtatattctagcatagcatgcatagcatggcatagtgtgataggtagtgctttttgttttattttattttttgccatagttacaaactttattttgcttgtcacatttgtaaacttttttattgggaagagtttgatattttgttttaaactcattataattgcttgtatactaatttttttggtgtgggtaaaagataaaatatttacataagctctttgcctttaggcaaacataacaagaagaagtgccactttacactttctagcttgtcttgatacattgctcctcagtgtgctgtgtttcgtgcagccctctgctgtaggccttttagagtgtgtggggcacttgtgatctctactgaggtgtgtgtgtatatgtgctttatttagactgagccaaacaaaacttactattattactactattactagtattgatatcatttgtttttttgagacagttttttttctgtgtagccttagctgtcctagaactgctttatgtagaccatggtggtctcgaacttagagattggcctgcctttgcctcccaaatgctgggattaaaggtgtactccacccaccatgagtgctaaataaagattattagtcttttgatattggaacaaaaaaatttgtttttaatcatagttgtcatctccccctcccccgacctccagttggttttctgataatcttcatggacttcttgtcaggctcagaagttgcgcctctggtttgactccagcacagcactgcacagcactgcactgaccaccttagcccctcaggtcctgcttttcccatgcatggctaggacaatgtgatctctgatcttactcctctgctagtctcagtgtttagcacattgtaaccatatactagtagtaaatagataaataaaaattctagaatttctggaaataaaattagaatgaataaataacagtattcagtaagaatggcttcagtttttttctttgaaaaatctagtggacaaaaagactgttctaaacagtgtggtgtttagtttgaacagcacctaaaccaggaagggcagggcttttgttatactacaaagatgatatctctattttattttatttttgtttcatgtgcattggtgttttgcctccatgtatatctgtgtgagggtatcagaaaccctggaactggaattatagacagttatgagctgccatgtgggtgctgggaattgaagctgggtcctctggaggagaaaccagtgctcttcactgctgagccatctcttcagctcccaaagatgatatttttgaataataacttatctggcaaatttgctatgtttgtgaaataatatagtactaagcatttgtagaataatttagaggtgtatgctgtagcacgtgagggctaatggctaagtttggcaggcataagaagtaaaatattttaaccatagagttttcagtttcagagataaaatactcattttaaaggacttggggaactaaatgagcatatttaaagtagataatttctagaaaaatttgccttcaagttgtaaaaattgaattatttaaggtgaacaggggagtaaggactggagtgactgtaattaggccagtgccagtttggttcctgagaagctaatggccatcatgggctaggggaggaggtgctttgtggtgaagggacgattgcattgctacaaagaggcagagcactggagtgagaggcatgctgcctccgtggcgctaagtctcagaaagattggtcttgagtaagaacaatgagttggggactcttcaaagagttcttgcggttctgtatagtgtggttctgtatagtgtggagtgtgtctgtgtgttgctaagggtgatgaagtgtgagtctgttgtgacagttcttggtggctttccctctctcatagagctagagaaacccatacagctagagcaaaactgttagtaaagtggctggtgtctttataattctgtagccagtaaagtttaaatcagggggcgggagtggaggaaaacacgaaagacaaaactacctcagtgttgagatgggtttgctgcatctagtgataggggaattgcaaatgacttctcgtgacgggtatgaggtttaaggtgttagtaggaggtatcttgggcatcaagagggtacacttagataatccatcttatgggtttcaggaattttacttatatatggttgtatttctgccatacagtttagaatctgtgagtgcaacatgcaaacagctgagccaagaactaatggaaaaatacgaagagctgaagaggatggaagggcataacaatgagtaccggacagagataaagaaggtgagagcctccgtcagagcctgggctcagagctgggcaggaggtgctcagtgagggaaatgtgttgggtggtcagtggaagagtttgctggaactcagtgggaggaggagggatatgagaggatgatagggatggatgatcaaaggatactgtgcatgtggggaacttgtgaaatatgctcatgatgatttctaaacaattatattgcttattaaaaaagacattatattacctgtaatttccttattggcttcctttgtgctatgaagtagttaatgtcctcattggctgttggtactctagagcctttttttaaggggtcctgtccccagtgtgctggtgtactctaatcctagctttgggaggtgtagacaggagatcagagccagcctgggttagatgagactgtctcaaaataccaaaaataaattaatttttttagaggctttatttagaggattagtcttgttttatagcccaggttggccttaaactcataatcctctggtcttttgaattctaaatattgagattagagacatctgttaccatacttggcttaatttgtgtttttcactactttgagattattgctagttcctgtgcatgtgtgtgtatggtgcacacatgtatgtgtatgtagagcccagaagtagatattaagtagctgcttattgctctctccccacacactcacctgcctcagcagctctaactgaactcagtattcattggctgactagcttagctggccattgaactgcagaatcaacctttatctgctgtccctctccccatgctgggattatagatgtatgcaaccttccaggatgaattttatgtgggggctaggaatctagactaagtccttctgctcctgctgcaggtatgttatagactgagctgtcttcctcaaaggctcttgcccctttctacctcttatctttctgttagttctctcctgagaaacagaaaactagataaagaaacaaacaaaaaccccaaacaaacaaacaaattttaatttttagctgtgaaaagaatgaaagtcttagagactacataaattagacatagactttgccattgaccccagtgtttgagtaacacatgtttttctgagacctaatgcatgattttgaatttaaataccagactttcacagtagttatagaagttgataacttgtagttgatgattttctgtatatctaatctaggaaaaatttcatgtcttaaggtaagatagacattaccttattttatcaattttgtgtatatttttctttgttaaattctgtacattttaaacatttacttgtcagtttcatacatatatatgtactgtatattatatcatagtcatctccagtgccctcttttattcccttctatgatctccctttcctatcttgtcttcttccttctttctctttgtctttcttttaggcctacattgtttagggttgcttgcatgaacgttggcagggagttatctactggagcaatttaccagtaactacactattgaagaaaatgacaaccctgccctggcagccattaaccaggtgtctttctctctgaataccttgttctttagggacatgctaggccagtgctcgctctaccattgagctacatctctaaaccttgtttgttgagaaggggtcttcctggaagttcaatctggccttgcaatcactggcagatcaggctgctctcaatcctggggtctttctgtctctgcctctacctcctaagtgtcagagttactgctgtgtagatttatatgcctgaatcctaaatactttctctgaacttttggtgttttcttttgtgcctctctatagttgaaggaacagattctgcaggctgatcagacctacagttctgccctggaaggaatgaagatggaaatctcccagctaactcgggagttgcaccagcgagatatcactattgcttctgccaagtgttcctcctcagacatggaaaagcagctgaaggcagagatgcagaaggcagaagaaaaggctgtagagcataaggtaaagtccatccagggcgctccacttcatatttacctgtttgtttttaaagaatgaatttattcaaggaataacttccgtatttcagtggtagacacctgctttgggctggttagcaagcaggatagtgagggttggtggggaggtcagattgatacagacaaggaaaatgactaccttagtggtacgtgggcaaggtactgggagcacagccaaggagttgcttatctagagtaaagatctctcttcctgcaagaggagaatgagtaagctggaagagaccatgcagagctagtaaaactgcaagatgtggcctgagcagcgggtggggagccaccattcaagggaaatggggaatggatgcgttgtggagatacttggctgcacggttggctaggctttgtgtttgattagactagggtaacaaaggacagtaagaagctattactgagggatgaagcttgagtagccaagtaatgccctgtaacaaggcagagaatggttgtagtgctgtggaagatgatgcatttctatgaaagatgcccaggatagggaagctagcagaggagacattagtttggcacatttggtttcagataaagcctgaacttttatatggaaaaattggttagttggctccacggaaatcctgaaattcaagggttggccatttagttgtggaattcctggatgaaggtggcatttgaaatccctctccccagatactgcagttatagtgaaaaggcaatagagtatgcctaagagtgacttggatcaaatttcgcagatttctcagttggagtgaaggagtgggatggaactttaaaagaagtggcagtgaaggagtttcccagactgtgcctgctgaggaagaaggccatgaaaggaggcaggaattttttcatagagatagtctagcagaaaagctcagcagagtgagggctgaaaataaatgaatgctttatgcaagcgcagtcccacgtggtggtggtggcagaaagttgatgcgagctggaagcagggtgtgtctaagatcttctgtgactgaatctttgtgccttagtcccattcattactgagtgacatttaatcacatgcacagtgctttgcctgctaacacctttgacactcttaagaagcatatgtggggcctgggagacggctgagggagtgagagcccctctctgcaagcataaggacctgagctgggattcccagagcctacatagaagccaggcgtggcttcatggtctgttgattagcctagcattgcaggggaggggcacagcagagagagctgaattctgagaacttgttggctctggtctctgcaaatacacatgacaggcacacttgtgctctcatgtgtatgcaacacacacaacaccctgtatctacacacattttaaaagtttatctatatggatagagaatgtagactggactaagtagactagagaaaatgatgtggaaaagctttgtaaaatatatttgatttatgtgagtcccccgattttccttttgcaggagattctaagtcagctggaatctctcaaattagaaaatcatcgtctttctgaaacagtgatgaagctggaactgggcttgcatgaggtacacacatcgacacttagcttttgtgtttttgaagcctttgaacgtaactgttaatattgatgctagaagaaggtagaattaactagtttgaacagtcccttaggagatacagtcacaaatgaggtccaggtgccctcctgccagaggatgtttatgctgaagcagtaggatagtttcctattgtgtgtgacaagatggatatatagtctgtgttctcagcaagggaagtatctgtaaagtgccagcagagtgctggcagtcattgtgaagtggacactgggcgctgcttttagtgctaggctgttgtgctcacagtgtctttattataaagcataccatccttgaagtattttagttttcattttatttctatgaagcatacatagttcatttattcaactattctagaatactcagtgctaaattgcacacaggataactgatcacgtgtttgactctgaagacattatactaatttagtggagaatatgagaaatacatataagctactgtgaaatcagaacaggacagtgtgaagttatattgtaaaagtcttacaatttaaaaaatgatgcatctattctgatccatctttttttggtgtaggtcaaaagtcggaagattgaattctttttttctgaacttccagggagtgttctgcttccaaaaagattcatagtcacaaaaggcacccagtttgctcctaatagttccaatttcacagtcatggaggccgagagtgaagacgcaaaaggctagaagaatactttatttcaactaggaaaatgggggactattttcataatctttcagatgggcaagattctctaagcatcatgaagccacaaaggattttacaacataaaaatgtaaaatttctggatggcaaaaggctccattgaaaagactgataatagaagcaagtgtggcagctcatgcttataatcccagctctcgaggggctgaggcaggaggagcgagagttcaaggccacactggacaagaccctgtctcagaataaaaataacagcagaggggctgggagtggagcttagagggagagcactcgcctagcttgaggcccggggctggcggcactggtgcttgaaagaaaggagcagtaacctggaagtagacacaggctaaccaagtgtcagcaagtaagagttcctacagaggcgataggaaagagacccagtcggaaaagggcaaagaactaagtagatatttaaattcaagtgagcgagggaagctattaaacttccctaatagccaaaatttttaaaaataaaaatttcttgctaataagcttgataatgatttagaaagttaatatatggcctctcttggcaagtattttaacagcaggctctcccatgcatatagagattgccttcagtacagttgagccatggacatggagcttgtaagtccatacacccccagtcctcccggtatttccacctgtgatattaatagtcatattcttcactgtcctcctggtatttccacctggaatattagtagtcacatttttcagtgtcctcagcagtttgcatccccagagagcccaccttatgggagtaaaggttcagaaatgggcacagcaggtattatgaaataaactggttacttaaatggttgatttgtgattgtactctgaaatatgctgtcatttaagatggaaacattcatttaatttttctgctactccacatccctgtgatactgtaatgaaaaaaattttttaagcacaaactcacatggatgggaaaaaaaatagaggagacaatagccaaacatttaaaatatttaatataattttatttttgtgtgcatggtgggtgattgtgtacacgcatgtgtatgtacatgtgtatgaatgtatgaaagctaggggttgatattgaatgtcttcctttatcattctctaccttttgtattgaggcagggtctctcacttggaccctgagcttgcaaattgggcttgctccagagatcctgtctcctttttccaagtattaagattactggcagtctactgtgtctactcggccagtatttacatgagtgttatagatctgagctctggtcctcttgcacggcaagtactttaccaactgaatcgttttctcaatcccatagctaaatattttataaagttttgtcaaggaggtggaagatggatggaggtgggggctggggcacatggctaaccagctggctgtcttaatgactagatggatggctaataagtggatggattagtaggtgagtgggtaaatggatgagcaggtaggtgagtgagtgagagtgtagccaacaaatgactttgtatgccctgataaagccaataccgagcgagcgagtagtaatttgtggactaatctgtttacactatagtgttctttaaaaatgtgtcatttgtcagtattagagtggctctgtttacattaaagaactgagagattccagagatgctaaaggcagactgtgcagggttctgtggagctgaacttctcttgaaccttagtgggagcgctgaccctctttgcccactgagtgcatgcctgctccccaggtgtcatgccgcccttcccgctcaggcaccgggaggaattgttagtaagctaatagctctcggagatttcagaaagatgcacagaaaagacaagtttctcttctttttagctatgtgcaaggggtctcaaccctccccccgctgcgacccttcagtacagttcctcatgttgtagtaaccccaaccatacaatcatttttgtcgctacttcataaccataattttgctactgatatgaattgtaatctaaatatttttggagatagacatttgctaaaggggtgtaggttaaggaaagctggtttaatgatttcagacatcaaagttgtaaaaatcctgtcagctttagctttctctggtttcagagttgcatacagtatgaatatctgtacagattatcaaaacataattactaggaagtgctttttgcatgttaccacccaggaaggcgaatttacttttccaaattaatctaattatcttaatgaaagcagcagctttgattaatgttggccactttaaagatgagtcgtagttcatagcgtagccctgcattttagaaataaaaaggtgggtaggtagtcgacagtgtagcacttgtcctgtgaatacacttctctgagatattataaaacatggacagctactaatcctagtttacaggtctatttacacacttgtgagttgacaggcaaattatgtttatcagaactctattgactagcttactttcacaatttttctttacagaaaatgaaatatgttaaactgtaaagatcaccataattttatagaatgctaattaaatgaaaaaaattagaaaaagaaagtagatgtgtattatcaagaaataagatatatgatcacagaactaagaccagttcatggtaaattcctgccacataaaatagtcctgcttttatgttgctaacttcatatcaaactacatgccaaaaagtatttaagatggaagggtatttattttaaagttaccccttttggccagaattctctttagactcttgtgtttaaattactttctttgagttagttcttttaatttcctcccacaggtattgtgtgtaaggagagggctcctcattcttcttgatttccaggtctgattcttgaagctttcctctgccttgtttccatgccttgaatgcttatgtacagaaggaagccatcctgcctttaactttgtcccttccttcactctaggcagactgatgcttttcctgtgttcatcttaagagggctaaagacaaatctttactttctctaagtaaagccatagttaaaactaaaacagaaaatatctcagccaacactgttgtaggttgatcataattacccttaaacatactagtgattctcgtgttcttttttattaggcaaaagagatttcactagcagaccttcaggagaattatattgaggccttaaataaattagtgtctgaaaatcaacaactgcagaaagatttgatgagcaccaaatctgagctggagcatgctactaacatgtgcaaaaaaaaagatggcgagatctttaacccagcacacagcagagctgccgggttcaagaatgcagagcttaagtaaagtttcctccctccctccctccctccctccctccctccctccctctctgtctcttaaagaattacttatttattttatgtatgtgagtacactgtagctgtatttggacaccggaagagggcatcggatcccattacagatggttgtgagccaccatgtggtttctgagaattaactcaggacctctggaagagcagtcagtgctcttttactaagccatctctctagcaccttaagtaaagtttcttaaaagtctctttgaagtgcatgtgctacggcctgctttcctactttgagaagactttctggcttagagctgtgcagtcatcacaggctctggtttaactctgcccagtgtgcacaagaggctcaggtggctcagcctatttcatcacagcttttgttctgtgcaccctgagtgtacatgtgtgtgaacagcagcttgttcctgagttttcatgctgcctcccactaccttcatcacacctgttccataagaagtaaaacgtggctttctataaaaagcacccattgcacttttttttaaaatgtatttattttatttatgtgagtacattgtagctgttttcagacaataccagaagagggcatctgatcccactacggatggttgtgagccaccatgtggttgctgggatttgaactcaggacctctggaagagcagtcagtgctcttaaccactgagccatctctccagcccaaagaacctgccaactctttttttttttttttttaagatttatttattacatgtaagtatactgtagctgtcttcagaccaccagaaaagggcgtcagatatcgttatagatggttgtgagccaccatgtggttgctgggatttgaactctggaccttcggaagaacaattgggtgctcttacccactgagccatctcaccagccccccattgcacttttgatcaattaattttaggttgttaccataagaaaggttatttcaatgagaagccaactgacttgagtttgttctgtgtagcctgtgtgttttcctaccagaagcctttgttagcatccccaccccactctcacccacggtgacattctgagctttctctgtgcacggggtgccctggccctgttccttctgcaccccactggcagcatgtttggccgctgctatgctgggagcatgagagcagagcccgaggagcgcttgtctccgagtggactgctcatttgtaagcagtagagtcctgtcgcatagcctcttatgaacatgcttctttcagcatttattggaaagaaaagttgctacagtttttcatttatcttgttttctaatctgctatccaggccaatccatggccagcacagacatgacggaataaagaccgagcagtacaaaacaggtcaccactcgcctcgaggacaaacgttggatagcatagaccctgtggccaggggtcccagccccctgagttctcacatcagccccggcagctccaccgtctctctgccttccaactttctatttgagactcactgtttgccttcagtgctagatataaatgatgtcaacttttctgacagtctgtctgactgtatgaatgaccaagaagagtttgtatcttcggtatgaaaactttctcatgctaatacttatttttatttttaattttaagctaaagagggtgattttttttttttcttactgggtcccagtcagtaccctgtatcactttcacatttgtagttttgcttgtgaaggcacattcaaccaagacagcttcaaattcaggttctaaaatacttagaatatgagtgcaggcattcactgactttagcctgcgccttcttgcctgcctttcccaagagggctgaccatgctgcagggattgaatcaaggactctgtctcaagcatggagactgaggagggaaaagaggggctgctggggaggagctggtggcctggggctgagggtggtgcatctaaggtgaatggagcatgatttgagtacctatgatggcgccttaccctcaccactaggctccagtgttctttaccttccatcgtgaagccggtgttgggctgtccattgcctgttgttagctgtggtgtgtctttgtgaaagtttagtaacctttgtttttgtttttttgtttgtttgtttgtttatttttgaatgtgtcagcaattccatggaaagattttcttaaagttttcaaaataaatgtccaatttaacttacacatagttaacaaaaaaaatcaacaccctgaaaagtacctttcttctaagtttggcagccagccttccctgccctatgatgatgtgatttcacaaatgtcaccttttccagctagtgtgagcatcacgcttttccttcagaagtcaggtatctgatggttgcgctctacagggccaacacggttggtccttattattcatcacttgccggtttgactgcccactaaactgtactgtggccctgctgtacccacatgtggacacacagaaagcaggagagctggctcccacgctcctaatagagggagcaaaggtggccttgtgtttcgttccagtctcagtgttcatgtggtgatggcgggcagcaccctgctgtgtgagagccttgattccagcaccagttacagtggtagccgtgggaaagtcatttctcacttctgaaactcatttctgttttgtcaaatagagacaagagggtgtatatatgtctatactgtgtgtgtttatttcccccggaggcaatgatttgtgctaactcagtgtttaaagtgacttctaaagtataacattaaatgagagcaaactgcgtgtgctagattttcctgtattaccttcaaaaatctgagatctgaaatatcaccagaactgagagttgcagatcaaaggccatggagtggaattttaagaaagggaaaaatattgatttttaactggcatttaatttgtttcctgtagattttcagtgctttaaagtgagagtaacattcagagttttgaaatagcaggcattggctgtattcttcagtaagaggcaggcaggcatttctagtctaagccgaggtactctcagacaactgacgacatttcctatacactttacacagacactctttgggtcagaaagaaagagctctgtggagctatgttttcagaacttgcctttttttctttcttggatttaagatgaaaatatctcctcaggaaaaattctccctttaacagggctaggcagaaaatatcaaaatgttggggcattcattcctgcttcctaacacatgtcatgatttgtccctctcccagggctcgctgcccacctctcctctgggatcgatagctaccaggtttctggaagaggaggagctgaggtctcaccatattctagagcgcctggacgcccacattgaagaactgaaaagagagagtgagaagacggtgaggcagttcacagccctcgtgtagccctgcacagccacagacggaagactggattataaagttgtaatgaagcaatgctcgcaagggcggcactgaggagtctgcagactgggcacttgggtattttcactgccttgtgtggaggactgcttccgtaggaacttgtgagaataaaccgctttgcagacttttctcacacgaatgtttattaccacagagcaatgctttctctttccgacttacatgtgaatagctgtgtactactgaaaataaagattgtactatacagtttgaaactagagtaactacagagcttcccttaaaggaagtatgcagtggaagcatggctgtgaagttgctcagctagcttctcaggctttctcacctttttaggtgcaaagtctggctacaagtgtgtcaaggggccatggggagtccttggcacggaggcttttgcacacattcacaaagagagggctgtataggttggagctggattcagtgtatgcagctcatgggatgtccgaatgcttagcattcgcatgctgaggagaggtcagaggggggagaggatttgaagccacattgttgacaaccaaggagggcatggacagaggagagcaggggtctaggcagctgaggcgcataggagccacaccagtgcagaagtggaccgtgcagtcagggcaaggagaaggcacatgctggacttgtcagctcaaggacccagctcctcccattctccctgctagagggtctttcccatcagcacgtaaacatcccgggattcttcttttcaaaagaaacagaaaaagtgcccacctactccatatatttgcttctctctggcaaacatttctagaaataggtgactgtggtggtgatttctgggttgtctcctctttctgagccctcttcaccctggagctgctgtcctgccttggaggttactaatgtcctcatcaccggacatcattccacacattcttcccaccctcccttgactcctatgacctggtgctgctgacccccttctgtctgcctggtctctgctctagaactttccctctgttcccaagctcttatgaccatgtgtagcccagtgttctctatagtcaagcaatcagacatacctctgtttttgtgagatgcctttatttggtagtctgaggagagaactcttgactttccctctggccaaggttccacctcagaaatgaaatctgcgattgccagttcctccatgccactcctggctccttagaacatcttctgcccagttcactgggaggccctgcggcttctgcttctctcagatccacccactgcgctcttgcgctaacacaagccactctcatatagaatctaggcgtggcctccctcctggtaccattctggtatccaacaccaattacttcacctccacagagtgtccagaacacgaatgcaatgttactgcttcctgctttgcaatccacagaggcttcttactgtactcagaataaaatcccatgatggatcatgctcacagggtctccatggtctgggcctgtgcacagcacagtgctgcccgcagtgagctgctcacattaggtttcctgaagggcttcctccgtgggctcttcaccctctaagaaggttttgttacttggattatgactcttggagacaggggcttctcacaccccgcacaagcccgtctaggaggtagagccaggagtaaatgtcgtccttaagatgcccacatactgccctcatgctgcgacacatgctgacctcctgctgtcttcttcccacagtctgttactgctcttttgctttcgtgaccgccctatcccacgtggtatgcactggccaggggcagggagcggctcacactctcacagcatccccagtgtgcccatcacggtaccgggagcagctgctgccttccttgttctctgtgccccaggactggacagcatgctgcccatatgggggcactcagtaaccatggtgggcacgtaacagtcctaaccaccagccttcgtttgttcttctctctagaatgagaatactgttactggggttaagaggatttactgaagttaggtttctaaagggctgctcaggttctgagatgctacatctgtggagatgagtctgaaagagtttttgaatttcagagtctcccaagcttcagattaaagatttccatctgatgtcttcactgggaggagcagggacagatcagtccctgggagcactcaaggaatcacgaggtgcgatgaatttccttaaaaatatactgtgttcttacaaaagctgaaatggtctgttgtctaaatttgtcagaacattcgattgcagtttaaccctcaactttgctttttcaaaggatttcctactacctaaagttgtccaaagttagtgagtttgtttcttagcaggttttataaatggtcactgaccagagttcccagatgagatggaaaggatcggaagtttatttcagacaaggtctagtgttgcccagtctgtcctggagcatcctctgtcccccgggcggcagcctgtcttcacctatgaaatgccgaggagcactgagaacacagcactgccacggctggggagcagcagagactttgtcagatgagttagttcatgcctcttgccctggattcctgatggatttgtgtctaggttctaggacacaggagctgtaatgtcccccattttataagggaattaaactggtctgtggagggtcctagagccttccttctaacagagccaagaggtagcaaggactctgggcaccgagtgacctaaagacctaatcctagcgcaccttttagctgggtgaatctgagccactgcactgagccccacacttgagtttatcatctgtaagatagagcaatgcaaacaatgcctacctcagaggttttgtgaaaatgaactaagtgtatttgtaaagcacttacaatcctgcttgggacagcatactgtggaagcatcttgactgggaaagagcctgtcgccttctgttctgtgagggctccctgactccaagccctgcctcccctctcctaatgatgaggaagccctggcagagctgtgcctggagttttctgtttgcagaatacccttgcgtctggaacctaaaagttacaggtaagaaaaatattataaataagctgtacatcactgaggacagagttgacacaattgtcacaaagagcactgaagtgcgggacagaggagagaagggagttgtcagcttgtggctgaaagatggagctaccataccaaatattgtgtccatgccaggtgtggcggcccagcgcccagaaggctgaggcaggaggataataacagcaaaacagtgggacttgcagagccacacagtagatctgggtcaaagggagagtgggggccggaggccgtgatggatgcaccaacacagttgctcgaggcaggcagcccaggtgcttcttaggggcaaaggcagaggagaaaacacttgtactttataggtttctggcgcctccaagcctggagcagatgcctatcttaagagaagtttcgcttgtacaggcctagtgaagatttgtttaggtgacaggtatacagtgttctcctgactgatagagagtttgtttgcttccgtacggttgcaggttgaaggcatagggctgaagtgtgatcagaagctctggttctgagaaggttcagggcatgaaggcatgaagctggaccaaagggaaagcctgggtggggtggggtggtggtgatggccttgcaggccttagagtagccccaacacactgttcacactttcctctgtgggaacctagaatatggaccttttatgctgcctctttgaccatcaaaagtgagttacggtcctcctggggaaagaaagcacccggtcaaggtgatgcctgagcagtggaaggcccagaaactcctcgggatcagatgagaagagagatgtgtgcacatgtgtttttctggcatcggatttggtttttgttagattcttgaaggtctctatgaaccaaaaacgagatttaagagtcacagctttcaggactgaagtgcccctgggatagtgtcttgtttcctggcaagagacgtgaaattgaagtcaaatcctccttccccggggttaagttttaaagtgtagtagagcatggaaactattcagtaattaaaaacaaaacaaaacaaaacacacaaatcattaaaaatgggcaaaggaacaaggcatagtggaacaaggactcagctgggacaagaggctcatgactcggggctccggctcagaccaaccatacacatacaaaaagttacaccaacaaaggatcttttaaaaagatatgcagatgtgtaataaagcacatgaaaagataattggcatcactggataccaggaaatgagattagaacccacagtgagataccactgcccagccactgtaaaagggctctgattagtgccgagcatgtgagaagagtcggatgcttacactactgatgggaatgaaggatggtgcgcatgtggggaagtagatgacactggttctccagagagcagatgtcgagttgcccatcacattgcagcatcagtcccaggcatgctcaagggaaggaaattgtcacgcagaaagcaggtcacacgtgttcacagtggcattttcacaacagccccacagtggacacaacccagacatctgcagttgaagagtaggtgagcagcatgtggttagccatgcagtgcagtgttatttggggatgcagagaaagaacatatctgggaactaccgtgctgtgtcagctacagaacgttacagaaagtgtggctctttatataatgtgcccagatcagacaaatttatacgggcaagaaggaggtcagtagatcttggtggaagttgggggaagcaggacaaacggaagagtatagactttaccttgggaattataaatattttatcactcatggccctgaccactgccccactctgagcacatcacagttaacattgaatttgcatgctttagattggggaggatctttttcttatatgtcatcatatatatatatatatgtatatatatgtatatatatatacatatatatatatatatatatacacacacacatatatatatatatatatatatatatatatatatgaatgatctattttgataatagctcccccattttatccacttcccctaccactgaaccccttcacagtcctcttactattttcagtggtgcgtgtgtgtgtgtgtgtgtatgtttgtattcctactgcatttagacttgcctgaaagagcatgggtagagagctatctacttgagcaagggcactttaaccagtggctatatcactggtgaatatgactcttcccctccctcagcagccaatgactgttcatatatcttcacagagggttaaattcctgtgacccttctcaaatgagtgaattttatgatatatgaattttattttctatttttatttttgtagatgttctcactctgtaacccaggctggcctggaactcactgtgtagtccaggctacccttgaacttacgtcggttaaacccacctcactcaagtactgagataataggcaagggccactagggttctgaattttatcttaatcttaataagttcctcccccctcccccagtactcctgattcaaggcagcactggaaaagataagatgaatttggtttttggaaatgtagtacacgttgtggtgggatttggtatttcctactctggctcctattctggagtgtgacactcctgtcagagggtggatcatagaacttcaggagcagttgcttctgtggaaagcttcagctgatgagataacatggctcagagagatttcccaagcacctatgctctaggcagctccagctcgctgcagtgggtgtggtcttggtgctgctcctgtggaggagcagtttccagagttacagagggtgaagctgcaggatccaagtggcttcctggctacagggaacttggggtcagcctcatggctaggattgcagaccactctctgaaaatgggaggtctgtgtccccagactgcttggcgagcccttctgatatttctctgagcttgactgggcaaggtagagaaaggcaatgcattggtaagtgcttgcctaacatatgcctctagtgcacatgcatacacacctgtatacactcatacacatgtctgtgtacacagtcccacacatgaacacgcatgtgtatacacaaaagatgtgctaaatcagcacgtgaaacattataagacagctcaggtccaggggacctcccccaccaaatggccaggatcctctcccaccatcctcactgcttcccaaatggacgaaggactgatagcctctctgttgaggattcctcctgcattatggtggagccccgggacttctctgaaaaagactaaatgcaagaaataaaatgcacagcattaaagagaacagcaattatgttggcactgagctatcaaaacacaagaaaagcaaatttgtgatactgtctaatgtgtgcttccctattaactcattaaataataaggccttatggcagatctatcacccaccatgccttgaagcagccgtgcgtgcagaggatgttctgggatgtttgcagccattctaatgagctgtgggaacatctgtgatttctcttggaactaaaaccacaggtactgcaacaccactgtgggttacagcctctagtcacaatggaagaaatgtcacatttcagttagagagcccaagttcgtggagccctagacttgtgttatgcctctaggctcctggggatgccgtctgtggctgccaggttaagatttcagaaacttaccccacttacctctcttcattctggtttcctggagatgttttacttgtttagagggggcagcatttatacttaatgtaaaaattgtaaacatattttatctttatggctgttttgccgaatgtgtatgtgtgtgcaccatgtgtgtgcctggtgcccttgaaagttagaagaaggtgtcagtttccctggaactggagttacagatgactgtgtgtactagaaattgagcctgggtcacctggaaaagcagctcttaatccctgagccatctctccagatccttagcacaaactctcaagaacaagttctcgaataaggtgaatgggttgagataacaaactaacttatcgaaacaatggtacttaaattttttttctgcagcagatttgtgcttctgagggaactactgcctgcgtctgacaagtcgggcatcttgcttgagttgcaggtggattccagggctcacaaagcctcaaggttttggcagccaagtcaaaccccagggagctggaactcctctccatggtccttttggaagaaagttaggtgtggtggtttgaatctgcttggcccatggaaggtgatactcttaggaggtgtggcattgttgaaggaagtgcatcactgtgtgggtgggctttgaagctctgcccatttcggaagagaccctcctcttagctgcctatgagacagtctcttctcctgactgccattggatcaagatgtagaactctcagctccttctacagcaccaagtctgccaggacgcctccatgctttctgctatgatgataaaggactaaacctctgaaactgtaaggcagccacaattaaatgtttgcctttataagagttgccttggtcatgtgtcacttcctagcaatggaaaccctaactaagacatcatggtcaaacagctcaagtccctatctgccacagacccagccgcaagtgacatcttttgtaggctatggataatcaaagacactctggaccccttggccatctcttttgactgaatgacagagagttctactttctgctgtggaaaaagggcacatagcatggctggtgcttgctctgtgaaccccaagaaaactttgcagtgcccaaatgcatttttctgtgcactgaggcagaggagacaagagaagggtggagaggcaaaacaaagcttggatgggtgtaggcagtggtcccaatctgcctttacacaaaaatttctgcatctttatgcaatctctacaaacttggctatgaatattattgaacaatgcatcaaataacaactccatcagacaggagtctgctgctggggtccttagccacctcaaactagggtgtctgtttccttgaaagaaacaagttcttcaaatttgtgtttgtcactaatatttaagattagcttacaaggtaatgggctttatcactgcactcatttaaaaaaatatcaggtctaaaaatatttgatgggattaaaaaatcaatgcatggggctggcgagatggctaagcaggtaagagcactgactgctcttctgaaggtcctgagttcaaatcccagcaaccacatggtggctcacaaccatccataatgagatctgacgcccttttctggtgtgtctgaagacgactacagtgtacttacatataataataaataattatttaaaaaaatcaatgcataatattattttaaagttcagaaataaacttggtaaagaaaagaggaagaatctcaattattgcacttttgtgtacagtctactgctaagatttctgaataaatactgcaaagaaaattaactattttgtgtcttatcagtgtgggctgtgaagaacttaaaaatgctgtcactaaaaatctctagacagggattgtgtatcgtctcaagaataaatcctaatataaaagttaaggtcactcaagaaagcttaggatttgcatttgaaaagacttttcaagattccattgagtgtttcatgtaaatgctatctttcctaatgtgtggcttttatctttttcattgtaattacgtatttcggagaaaatgtgaaggaatttgtctcatattgtcttagttcattttctgacaatgtataagaattcctgaagtaaggtacaccagtcactttttttttgttgttgctgtgataaaataccatggcccaaagcaatttaagtgtttattttggcttatattccagaaggcgagagtccctcacagcagaaaagttatggcattgtggcggcaggagcaggaagctggttggccgtgcttttatccattcacaggaagcacagagccaacaggaaatgggtgaggctataaagccgcaaaaccttccagtaacatacttcctccacagattgtcacctcatgcctgagggtttcttttgcttgacaaaacaccatgagatcaaaagcaacttacaaaaagcaagtttaatttggggctcagggtacaagagggttagagtccatgtccatcgtggtggggagcatgccagcgggtaggcaggcatagcggtagagcagtagctgagagctctcacctctccacaagcacaaggcagaggagggtgtggggagggagatggggggagagactgagagattggggcccccaggaacctcttccaagaaggtcatacttcttcatctctctcaaatgcttctgccaactgaggaccaagtattcaaatacctctcatcgaaatgacctacgggaggcattctcatttaaaccaccacaggatctatttcatcttaaaactctcagctaacactcctatcactgagaggagtcaggaagtcagagcagcagctcaagataggaacctggaggcaggaactgaagtggaagccatggagcaagccatgctgcttacttgtttgcgcctcatggcttgctctgccactttcctgtatagcgcagaaacacttgcccagagcatcaatcaagaaaatgccctatagacttacctatagacaatctgatggaggcattttctcatttgaggttcctcttctcaaataactctaatttgtgtcaagttgtcaaaaacccaaacaactaactagcatacctcccaaagattctataatctccccaaaataccactgtcaactgaggactaagtgttcaaatatgtgagcctatgaggggcagctctcactcaagctaccaccatcataatttataaaggaacaggcttcatttggctcatggttctggaggctgaatatccaagactggacaagcacatcccataaggtcctcctgttactgtctgaggacagcagggacacggaaggagtgaatgtgtgtgaaggagtcaaacatgaggcagccttgctttagagatactgcactcaagtagtacagtct

SEQ ID NO: 2401 - DNA, 2204 bp, Mus musculus
acgggcgagctgcggctaactgtggtgcggtctcggccctggccacggtggtgccgctaggctccaggcctcatggcccgcggccgcagctcgttgcggcccacctgccgcggggctttccaatgccgggttgcggctgcccggtcgtcgcgcccctgggttcctcctcctccctatgggactctgggctggccggccagactacagcaatgaattggtggcctagcaacctccaaagatggaaaagccgaagttcgaggacacagagctgtcccacattgggctatttcttgttgccaaaacaaagaggatttggagatggaggctttgttggaaggaatacaaaatcgggggcatagtgggggatttttgacatcctgtgaagcagaactgcaagagctcatgaaacagatcgatataatggtggctcataagaagtcggagtgggaggggcagacgcacgctctggagacttgcttggacatccgtgatcgggagctgaaggctctgaggagtcagctggacatgaagcacaaagaggttggaatattgcatcagcagatagaagaacatgagaaaaccaagcaagaaatggccatggagtacaaggaggagttactgaagctgcaggaggaattaagcagactgaagagaagctatgaaaagctgcagaaaaagcaactaagagaatttagaggaaataccaaaagttttcgagaggatcggtctgagattgagaggctaactggaaaaatagaggaattccgacagaagtctctggactgggagaagcagcgtctgatttatcagcaacaggtatcttctctggaagcacagaggaaggctctggctgaacagtcggagataatccaggctcagcttgccaaccggaaacagaaattagagtccgtggaactatctagccagtcagaaattcagcacctgaacagtaagcttgagcgggctaaggacaccatctgtgccaatgagctggaaatagagcgccttaacataagggtcaacgacctgatgggaaccaatatgactatcctgcaggaccatcggcagaaggaggagaaactaagggaatctgagaagttactagaggctctgcaggaagaacagaaagagttgaaggcaagtcttcaatctcaagaaaccttcatccttgaggcaaaaatgcaggagaaactgcaaacgacattaaaggcagttggcactcagcagtccgtagaaaggcctctggaggactgtcagaaggaaaggaagtacagctctccagggcaaggagtcttggataatgtgctctcccagctggacttcagccacagcagtgaagaactcctgcaggcagaggtgacgcgtcttgaaggcagtttagaatctgtgagtgcaacatgcaaacagctgagccaagaactaatggaaaaatacgaagagctgaagaggatggaagggcataacaatgagtaccggacagagataaagaagttgaaggaacagattctgcaggctgatcagacctacagttctgccctggaaggaatgaagatggaaatctcccagctaactcgggagttgcaccagcgagatatcactattgcttctgccaagtgttcctcctcagacatggaaaagcagctgaaggcagagatgcagaaggcagaagaaaaggctgtagagcataaggagattctaagtcagctggaatctctcaaattagaaaatcatcgtctttctgaaacagtgatgaagctggaactgggcttgcatgagggctcgctgcccacctctcctctgggatcgatagctaccaggtttctggaagaggaggagctgaggtctcaccatattctagagcgcctggacgcccacattgaagaactgaaaagagagagtgagaagacggtgaggcagttcacagccctcgtgtagccctgcacagccacagacggaagactggattataaagttgtaatgaagcaatgctcgcaagggcggcactgaggagtctgcagactgggcacttgggtattttcactgccttgtgtggaggactgcttccgtaggaacttgtgagaataaaccgctttgcagacttttctcacacgaatgtttattaccacagagcaatgctttctctttccgacttacatgtgaatagctgtgtactactgaaaataaagattgtactatacagtttg

SEQ ID NO: 2402 - protein, 532 aa, Mus musculus
MEALLEGIQNRGHSGGFLTSCEAELQELMKQIDIMVAHKKSEWEGQTHALETCLDIRDRELKALRSQLDMKHKEVGILHQQIEEHEKTKQEMAMEYKEELLKLQEELSRLKRSYEKLQKKQLREFRGNTKSFREDRSEIERLTGKIEEFRQKSLDWEKQRLIYQQQVSSLEAQRKAEQSEIIQAQLANRKQKLESVELSSQSEIQHLNSKLERAKDTICANELEIERLNIRVNDLMGTNMTILQDHRQKEEKLRESEKLLEALQEEQKELKASLQSQETFIAKMQEKLQTTLKAVGTQQSVERPLEDCQKERKYSSPGQGVLDNVLSQLDFSHSSEELLQAEVTRLEGSLESVSATCKQLSQELMEKYEELKRMEGHNNEYRTEIKKLKEQILQADQTYSSALEGMKMEISQLTRELHQRDITIASAKCSSSDMEKQLKAEMQKAEEKAVEHKEILSQLESLKLENHRLSETVMKLELGLHEGSLPTSPLGSIATRFLEEEELRSHHIRLDAHIEELKRESEKTVRQFTALV

SEQ ID NO: 2403 - DNA, 2194 bp, Mus musculus
catgcggaagtgcaaggggggaggtcgagcgtcgccatgggggctccgttccactccgcacagcgtgcagtaaagaagtggctctgaagctcggttgaaagtaccggcccgcgcctctggaagcggtggacgccggagttcgagggcgaacgcttggccaccctcggaaacccgggccgcgggcgcgaaaaacccttacccactgcgcgcgcgtcgccttcctcccggccccgcccttcttctgggtcacgtgactcgcggcgctctcaagccccggatgtggttgccaaaacaaagaggatttggagatggaggctttgttggaaggaatacaaaatcgggggcatagtgggggatttttgacatcctgtgaagcagaactgcaagagctcatgaaacagatcgatataatggtggctcataagaagtcggagtgggaggggcagacgcacgctctggagacttgcttggacatccgtgatcgggagctgaaggctctgaggagtcagctggacatgaagcacaaagaggttggaatattgcatcagcagatagaagaacatgagaaaaccaagcaagaaatggccatggagtacaaggaggagttactgaagctgcaggaggaattaagcagactgaagagaagctatgaaaagctgcagaaaaagcaactaagagaatttagaggaaataccaaaagttttcgagaggatcggtctgagattgagaggctaactggaaaaatagaggaattccgacagaagtctctggactgggagaagcagcgtctgatttatcagcaacaggtatcttctctggaagcacagaggaaggctctggctgaacagtcggagataatccaggctcagcttgccaaccggaaacagaaattagagtccgtggaactatctagccagtcagaaattcagcacctgaacagtaagcttgagcgggctaaggacaccatctgtgccaatgagctggaaatagagcgccttaacataagggtcaacgacctgatgggaaccaatatgactatcctgcaggaccatcggcagaaggaggagaaactaagggaatctgagaagttactagaggctctgcaggaagaacagaaagagttgaaggcaagtcttcaatctcaagaaaccttcatccttgaggcaaaaatgcaggagaaactgcaaacgacattaaaggcagttggcactcagcagtccgtagaaaggcctctggaggactgtcagaaggaaaggaagtacagctctccagggcaaggagtcttggataatgtgctctcccagctggacttcagccacagcagtgaagaactcctgcaggcagaggtgacgcgtcttgaaggcagtttagaatctgtgagtgcaacatgcaaacagctgagccaagaactaatggaaaaatacgaagagctgaagaggatggaagggcataacaatgagtaccggacagagataaagaagttgaaggaacagattctgcaggctgatcagacctacagttctgccctggaaggaatgaagatggaaatctcccagctaactcgggagttgcaccagcgagatatcactattgcttctgccaagtgttcctcctcagacatggaaaagcagctgaaggcagagatgcagaaggcagaagaaaaggctgtagagcataaggagattctaagtcagctggaatctctcaaattagaaaatcatcgtctttctgaaacagtgatgaagctggaactgggcttgcatgagggctcgctgcccacctctcctctgggatcgatagctaccaggtttctggaagaggaggagctgaggtctcaccatattctagagcgcctggacgcccacattgaagaactgaaaagagagagtgagaagacggtgaggcagttcacagccctcgtgtagccctgcacagccacagacggaagactggattataaagttgtaatgaagcaatgctcgcaagggcggcactgaggagtctgcagactgggcacttgggtattttcactgccttgtgtggaggactgcttccgtaggaacttgtgagaataaaccgctttgcagacttttctcacacgaatgtttattaccacagagcaatgctttctctttccgacttacatgtgaatagctgtgtactactgaaaataaagattgtactatacagtttg

SEQ ID NO: 2404 - protein, 532 aa, Mus musculus; identical to SEQ ID NO: 2402

SEQ ID NO: 2405 - DNA, 108591 bp, Homo sapiens
  misc_feature (1)...(108591): n = A, C, G or T/U
ttccttggagattggaaaaaaattcagagaaaaaattagtatttcaaattatgtgctataaaagctgctaatcacaaggtctcccttggattattcaatataaatcagatcccctccagtcacattctcctatactgcagcagtactgttggtacccattcccccagctactgtgtattggctgtcaaaggctcacagctgtgagaagagattttagttattcagtgtttccagagtttcaacaagggatacggacacaagcagccgaggctgcttcttacagagtgtcctctggagaggcgtgtcacctggcaatgcctgggaggttatgctgtcactgggggattgtgggaggggccaagccaatgactgaccaattcatactcagtacaaaggcctaaccccttgcctcaaggtgagaaaactcttggcatcgtcatgggccagaaatcccactggatcagactgaagctagacttcagctcaaaccacatcttggctcagcttctttccctgccctatcctgtttaccttacaggactcttctgaaagcacctcaataaatcacttgcacaagaaatctctgcctcaggcttggcttctgggaacccaacctaagtcacatcttttatttttccttcctagcatacgccccaaattgaaatcatgtatttgtatggctaatggtttaatgcctgtctccccaactaaaggctccatgaagggagaggccacacttactttgttcattgctatactcccagtgccaggcatggtgcctcccacagagaaaagcaatatgcaggctctaaactggaaagctgtcaggaaccaataggccacatagcctcttggcctccctctccagatactttcctttttgggtgttttggtacagacaattgaagaaagctaccctgtaacagcaacttagcatttcttgtgcccatcatcctcaagccagtcctagacggagatttcgaagccctggttgacaaaatctgactagcccaaattaggtcacctaattcctgatacaatgagctacagttctggcaccataacacaagttacgaacttgcccagaggctattcctgggggtggcggcagttctcggatgagtgtcatagacacaaaccaacagctgtcttacagatatcatattctggttcagcagaaatcaagaatagctttcatattttactggtctactaatattccagggaaaggctaggcaggattcacatgaacatttgtcaagttcttagatgttagtgtctcagagattacataccacaagtaagctgtaaaatcctcatttaacaagaatgtgaaagaactgtggcgttctaggtattttaattttttgaaaagctttttctcttgtataagtttttttaatattgtaagtctcttttctattaggttgtctttctttgcttactgaagggactggtgccttggggtctttattctgaagataaaagatttctaggcagaactactgatgcaaagagaagaaatcagcctggatgtatctggattataggatagctgctaaaatcatgtttgtgattgaaaacctaaaataagctaatttgttttttcatgtacctcttcctcctaaaagctaagtaaacaaaaagacccagcataaaaaggatgagaagagattttagttattcagtgttttcagagtttcaacaagggatacagatacaagcagcttcttacagagtttacaatctggggagagaacatgaaagacactgtttaacaggcaaataattccaggaataaatatacatgaatgtgtttttcaaaatacaggttcttatacaaatgtataactaaatactgattccatagtggggtggttgtaactgaaagggctttgagaaaaggctttgaataaaactagtcatccacctagccaaagatcctttccagcagcacaaaaggaatttgtaaggagaacagagattaactgtcagatatctttctaatctgtaaatttatccaaagtttgaaaataccatgaagaatcttaggaatgccagtaaccagggaatgggatatttgcatatcacaacatctacaggctaaatacactccgaatgcttctcaatgtggggaagtatgagaagttaataattctcctagtgtctggcttcctttttctttgcctttccctctcatacgttcaatcacctgtgttacaggacacacataagtagttggaaggtgttaaactttgacagcaaagcaaaatcagaggtagaggcaaatgtttaaccaatcatgttcaaatataagctactcaatgaagagttttaggtttaaagagcgaaatattcaccattactgagaaatctcagtttctcattcaatttcgcattgcactttgctaccacaaactaaatgggtgtacatttttgagtgctgatttattactcaaaggtttgaatttggagactgaaacaaaccatgctttatctgtgtactttgagaaaatccatccacaagaaaggagccaagcgtcagtttccaatggggggaacattctcatggaggtactgtaaggctaagtctgtccacttcatttcttgttctttgacagattctgtggtgccaccattgtcttgttcaggttcaggaagctcattctgaaaaggtacaatagaaattcagaacagtaatatattctgcatcttcttggaactcaagaacacttagaattaaagcttgtgagttcctaggaacaggcaacataattgatatgtgtattctaaaaaagctaaaatcatacacgtgaggaaactatcagaagtatcattcaaacatggcccgggccttcttcagtagggaatgatgggcattttgactctgacatttgtgaaggaggcactgtggcagaaaggttaagggcagaggcttttggaagccaactaggatccaagaccacaactctcccatttgctgggttacttgggcaaggtatgcaaacccttggggcctttgtttcttccttggcaaatgggagaacaaaagagccatcacctcacaggactactgtaaggattaggtgaggtaattcagatcaagtgctgagcactctgtggggtatccagtgctcaaggaatatttgctattattattagcggctaggaacactgagatgagtgaatcctaaatcttctttagcgggagcgtgctttaaaagaatactagtttgctggcatattccttagacacaagaaatgtatccaaaaaattatcttggacccaacatgtcttttttttttgagatggagttttgcttttgttgcccaggttagagagcaatggcgtgatctcggctcaccacaacctctgcctcccgggttcaagcgattctcccgcctcagcctcccgagtagctgggattacaggcatgcaccaccatgcccggctaattttgtatttttttatttttttttagtagagatggggtttctctatgttggtcaggctggtctcgaactcccaacctcaggtgatccacccgcctcagcctcccaaagtgctgggattacaggcgcgagccaccgcgcctggcccaacatgtctatattataataaaaatggaggtagggcaggaaacactgaaaatgtaattaatagataagacctccctctagtggtggagcagagcaacaaaaaacacaacaaatgaccaattcacaccctaccagcaattttcttaaaatggtaagtcatgggccacacttactgtaggatctgggatcatttacttgtattttaagtttaaatgtattactactgaaactctgctttgtaccagagttcacagataccaatatatttcttttcaattatctgtgttttgttttatggttagcaaactgttatgcgatatccagacttaaaattttccactggattctaatttgtagtatgtgaatatgttttcccctctaaaattatgctcaatatatattaaatgatatttacttatctatatttgaatcacatacatcttgttctacaagacagattcaaacatacttgaacagattgagaagagctatcatttattgtaacgcaataatatattatcttaaacttaaaaagaaagttcagtcctaataattacttatagatgacaaagaataaataggtccttggttaatgaattctttaattcagaagcagacaacgttgcttaatttcatcctatctgtggtatgctttctaaaataatgtgtctttcatttggtatctactgtcccttgcaatacatgccaacacataaaatggcatatatgcctggaaaacaaaaacaaaagtatcataaacccagccacccattatggtgtactgtaaaatgcccttagttctttgcagctactcttatcaaaaggtgaaactgatttccccaatcttggatttggactggccctgtgagttgttttggccaacagaatgaagctgtcatgccagtgggccagttcttggcctaagctccaagaagctctgccgtttcctctcaggttgctcttggaaccctgagattgagaagtctgggctagcctgctggataccagagaccatggcatagtcaccccatcacccagcagacagcttgttaactgccagacatgtgagacagtcctagattacccagcctccagagtctgttggctgactgcacaacacaggcaagcctggcagggatcagctgagctggtgcagactagaagtccctcccagctgagctacaaaatcatgaaataaacagttgctcttttaagtcactaagctttggggtgacttgttatgcagcaaaacctaactggcatacacattgccttagaatcgcaagacaagcgaaaggtgtggattagcagcagggccaagccaacttcgcctggaagtcagcagggaaacctccttccacccctgccacccaaatgttctccaatctgagccataaacttctccagaaatggacgtctcctttattttcttgactttgtttaggccctcctcccttgcctagaccacaacagcttgccaattggtctcacttgcccctatctccatgtcacaccatctctaacaatgctggctaaactgattttccaaaagccaaatctgagcatagcagtcttgcttttaagaccattcattcctggatctcctgaggatgaggtctaagtgtgatatcaaataccactctcaatctgatccaagcccaacttttcagcctacttatgtgacaaatgtattcttcatccacagtgaatgactcaccatgtcccaaagcctttcaaaactctgggcctttacacatctgtcccctctgctgcaatacccttgtctacctccactaaacttctggtccttccttatgacccagcttaaacatgacattctctcagaagcctttctgatgcccaccaggcaatcagccacttcgtatatgatgtggctgtttatgcccccacctagaatatttattatcacaattacttatctataagtgttgcctttctagacccctcaggaggaggaactgtatcttatgttcacatagtcttatggcacacagtaggcttcaaaaaatgcttgtcaaatgaatgaatgaacagaagttcacaagacaggatttggaacttcacagacctaggtatatgttatatgaagccctacttacctgctaccagactttgggcaagttgccctttctgatcctattcttttcctataaaatgggaataacagcacttccctcacagggttgtttaagaattagagataatgtatatttccaacctcagtccatggcataaaactggtattcaataaatgacatctataattcttattatgctctctcttttgactattttcctaagcttgaactaacctatgacttatttgatatgtatattattcattgaacatattactatctcttattcgtaaatgaaaatacagatgaactattttatttctttgcaaacagcagcagcagatattctaactataaattatattttattcaatactaactactcttctcagggcagctggcatgctttaaagaaaaacagtcctgttttcccttttttaggcctctatgacataaataggattttaaacaaacatttatataagcaaaacttttggatcacttattacatgaggtttaacaaactccctgcagcagagttttccaaagatggggaagaaaagagtattccagaaggccactggcctaaacgcaaaagaatacccaggtatcttctgaatattttccagggaacctaagataggtgtatgctccaagaatgtaagtttctaaaaatgctgaaagactgatgagccacaggcagggaagtaagaaacagagctcatatgctgctgcttcttgttcttccccatcttgcgcattaaactctcattatttggtttctctggttttcgtgtggtggacagaacatggctcagaaaatcggggctctagtcctggcatgactcctaactgacctggccatgttagctccctgaaccacatttttcttcaaataaaacatacaactggatgctctccagaagcttctagagttagagaattccacagctttgatttctttgccacactagtttatcttccattgatatccctcctccactagttactgccagatcaatacctttaacccatcctcagctcaaatcataacctaccagtggtattgcgacatcctcataaggcagcttgtcttctcgccaagcatcatcaatcaaatccaagatccttccatctctctgaacctcactgtccattttcctgcagctttgatcttgtcaaatctgtaagccaaagaggttatttcttaaacacgaagactgaagagatggtataatccactattaggattctccaggctttttagtctggggccaccttttgggaaaaggttcattttctcatatgggccgggtgactactttgatcacagttcctctctccaaccccaactgatacatattttatagtgtatactggacaggcatagcccagctgacagaccagtgtcatagagtgtgacaggagagcaacacgttaaacgaggccctcaaatattaatatgttgcatctcaatgtagctcttctcttctaacttgaacattcaccttttcctgtttgtgatgcctttgatgagtccctgattcataatggccagctaagtttcctttctagcccctggctcaaacctcagcattcttaggcacaggagtcacacgaacatactgtaaaggaaacggcttccttccctaaaatagtacccaggctgagatctgaataaagcacttctaggtgaacaccagtggtagaacctcatactgctaaagtttctccagtttctgcttccctttggggtagctccttcctcggaggttccttcctctaattcttaacgctacactcccttcaatttctggcccaaatggtcacgatgcttatttagctccttgaccatggctgattccccatttttctctgaaactgctataatctaatccaaaaggctggctagcttgtaggatacttctggatttccctgtttccaaggttgggccctgactcatcataggcatcatcctatgggtgctccctgctaccaagtgacaatccaaaaagcccggaagccactggcatcaaaggtactctcagtttctgagactatggagactcacacaataagcaattttggggtggtggagcggggtggaacccaccatctggaggtgcttttttcagagctcagcctgggtgatattttaaggaaggaagccatttcctttacaagctcaacttcagacatcgtcttgccttgaggatttgtgtcaggtctgtagttggtcccttcgcatagtccagtttagtgttatctcagtatgttcatgagctcctgtgcctaagaacgctgaggtttgggccaaggcaggtggaagtttttgtaaaaatggctcacagggccgggcgcggtggctcgcgcctgtaatccagcactttgggagaccgaggtgggcggatcacgaggtcaggagatcaacaccatcctggctaacagggtgaaacctcgtctctactaaaaatacaaaaaattagccgagcatggtggcaggcgcctgtagtcccagctactcgggaggctgaggcaggagaatggcgtgaacctgggaggcggagcttgcagtgagccgagatagcgccacgcgccactgcactccagcctgggcgacagagcaagattccgtctcggaaaaaaaaaaacaaaaaaaaccaaaaaggctcacagctgtcccccataggataactgcaagatatccctaacaccttggcaaaaattatacacagattggtgtgggaaagggtttacacccccatgacaaggatctcggcaaaagttaagcaaaatgcgccctgctacttctgtcaccggtgagccaggtgagggcttaattaatccagtactcaataattaaccgagtactacccagtggataactcaaagcaagacgaagttttggttatacttttgaagtccctgtcttacaagtgctccccactttcctgctgctactcctttgtccttgctgctctgtctcctgggatacccttctcactttcctcagctgatccaaacctgactttcggaggcccacgtagattttccacctttgtaaagttttctcaaatcactcgagcttcagtaggccttctatccttgaactcttgcttcttgtcctaacttaatctactaaacaagctaggtcagctttgtggtcaattgctcaggtattattgcctccaactgttacgtgtacattttgtacccatgattccttagtagatctttccacatttggtctcaatctttttcacctgtcccttctccaaacacctccaaccctgtcacattttccagccttgacagttaaaacccccttttccacatcactaatgccactcttcctttcaagataaacgcaggcgtcagctcttgaaggtcaacatcccatttccgggattaggcgcgaaggtgccttccctcataaggggctggaaggatgggaagcatcaagataatcaatgcccagggcacactgattatcttgtgtattaaagccaccgtcccaagtactcgtcacccagtacgaccactgtttcctgaacaaacttttcttactcacgtgacagtcccgatgcctgcaatgctctttgtttcttcctttttattccagtgaacccacagtcagtctaaaaatcttaggtcccaggtcgcttcctataggaggccgcctccaaaccccaggctgagtgcggtcccggtacccacccctccaggggtctcacagttccctaagcacagagcatggcaccaactggggagtctgtcaaacagcccagatgaatgtctttccaaacacgcggtgcctgcgtttccagggacagggacacgtcttatcaatttctatatattacagctttgtaaacataatatttataaaatcaaagcgggaaagccttgttccttgctagaaatgagcctcgcaggccaccaccatccgcaccgtacgacaggccgtccctcagctgcggcttcctgcctcaggcaggatgtaccaaacgtggaagcggagacggggaggtctgggggtgccacgcaagtccctttcctcccgacacgagtgcagtaaagaaaaacggttatgagcgtaaagtgacagcctcggccgatgggaatagggggaagtccgacactgagcaacgaacgcattcccgcgcctccaaaacctaggccgggggcgctggaaacccttaccggcacccggccaccgcggcagacgcttgctcctgccacgcccccccccctcccccgcatcacgtgtctgcactcgctttcctcggattcccggatgtgggtgagttcatttgctcgcgtgcaggggaagtctggagaaggcattgtttcaattattaaaagtgtgggggcagtgggcggaacaaacgcgccgactacagaggctggacgtaagcttagcggtggcgcgcgtgcgcagcgccggcccgaggtaacggcgggaaggctcaggggcgtgcttgcggcaaccctgtaaccgccggtgcgcaagttggaggggcaaggggctgccgtgtcctggtctggaggcggcccaggctgccttggtgattctggcttcgcggcctcatggcttgcggccggtttgcgcaacggcctgcgaaccaccaggcgcgtccccgccggcttgggtccgccccgaagcccagtccctcggcctggcccgctatgccctgcacactggcggagtctggcgtggcgcagcccggcgtggggttcggccccgccaggtggtcagcccttcctcggagtccaggtggctgggggcgcttcggagagtggccaggtgggcgagcgagctgcgcccagtactcaccttccccggcggacccaccttccttttcagcggagagaccccagtgcggcctccctgccagggctgctgtctagctagcgctgttgggactacttcattcacggcacaaggggacccgctcatttagtgtggcatgttaaggttggcagcttttaaaatagtgagttggtttaaacggttatgttagtacaagaggtacggaaatgtggcataaatcgtggactgaaattggagaaccctgaactaacggctccatgcacacaaatgagggatagaaagaaataaggacggtttcttaggaacactttaatcatggagatacttgaagacagtacatttaggcttataatgtggtttttcttacgtcccttacgacatcaggagagtaaagatgagtatgatgtcagagacaggtcgtcttttacagtttcagcaccgtacgctgatatgcacagagtagttttccctgagccttatgtctggttaaacttattaaaagaatttattattttaataaagcagtattgtagggtagatgccctgtatttatacagttcctcaagtgcttgcatttattttttagatacgaggaaatcataaggatcgttgattagatttctgttagctgtagcttaatgataaagtgtatatattttcttatttggcatgcagtaccatttttagattgatttttattttgagtttgctttttgactgtggcattatcagtgatcagggtagtaaaaagctctgaaactaaattagagtagagatttataaacaggcacactgccttttaaaatgtatgtagatgcaaatctaaaagttgtttgtaaaaattgtgtatgttgattgtactgatgccatttcctctcgttaaaatggtggaagacctttgcttagtcctttctgttctaatttatgttgtgctggcagatggtgacagcatcagtagtccactctgtcattgcttcctgctttcaaaaaatgtcaacttgacttgaaattcagctaaagccaacattgacagaaggtttcaggaactgaatctccgatctttatgttattttagtccgcctccccgcccccatcaggagctaggtttttcagttttacagagccacagtactgtcattacacatacacaaattaataaaaattctctaatgtcaatatccagtcagataacgatttcttcaactgtctcttaaatgtctttttacaattagcttgtttgaaccaaaatcccacagggatctgcctattgtgtttgggtgatgcacatttgacatcttttaatctatatttgttccctcatagttatagctatgggattagcccctatttttccttacagttctaaatttagcagattgcatcgcacagtatcctttaacatgtatctctgttgcctttgtgtcctctaaaccaggggcccccaaacccggggccgcagagcagtaccagtccgtggcctgttaggaaccaggctacagagcaggaggtgagtgacaggctagtgagcattacctaccacctgagctctgcctcctgtcagatcagccgtgaggttagattctcctaggggcacgaaccctattgtaaactgcgcatgcaaggaatctaggttgcacacttataagaatctgactaatgcctgatgatctgaggtggaatagtttcatcctgaaaccatgcccctaaccctgtccatgtgtattattcatattactgaagaagtggttggccgggcgcggtgactcacgcctgtaatcccagcactttgggaggccgaggtgggcatgaggtcaggagtttgagaccagtgtggccaacatagtgaaaccccgtctctactgaaaatgcaataaaattagccgagtgtggtggtgtgcgcctgtaatcccagctactcgggaggctgaggcaggagaatcacgtgaatccgggaggcggaggttgcagtgagccgagatcacaccattgctctccagaccaggcaagagtgcaagactcggtctcaaaaaacaaaaaaaagtggtttggccattcctcccccaaaacatttcatatgaattttaacaaaaagatatttacaaaatgtgttatttccgccctgtcggtgttgagaaattgtcttccatgaaacaggtccctggtgccaaaaaggttggggaccactgctctaaaccagtagttagatgtagaattgcactgtccggtattgtagccaccagccagcagtggctagttaattaaagtgaaataaaattaaaaattcagttcctaggctgggcgcggtggctcacgcctgtaatcccagcactttgggaggctgaggtgggtggatcacgaggtcaggagttcgagaccagcctgaccaacatggtgaaaccccgtctctactaaaaatgaaaaattagccgggcgtggtggcatgcgcctgtaatctcagctactaaggaagctgaggcaggagaaggagaatcgcttgaacccgggaggtggaggttgcagtgagccgagatcacgccactgcactccagcctgggtgacggagcgagactgtctcaaaaaaaaaaaaaaaaaaaaaattcagttcctaacttgcattagccacatttcaagtgctcggtagctacagattgcctggtggctgctttttgaacagtgcagttataaaatattttcataattgcagaaagttgtattgaacagcactgctctagaagcctgatgagatttcacccttatatttgtttttgttttgttttttggtgggatagttgggggggttggacagataatttcataggtaatgcagtatacttcctatttcattaattatcagggaagcagtgtctgagttgttttctttttttatgatgttaacattaaacattatattgggtttaggtgtagttagctccatccacccatagtgaaattccccaagactctttcacttagtggtgaagtccttttgtggggttatattgcctgtatccgttattgcattagaggttgcaacgtggtgattatctaattctattatttcttcaatatttatcaactgagagtcttttatgaagaactttccctttccagctgtttgactaccctgaaatacaatttgtacaggaaaggcaagaaaaatgcttaattctttgcctctattttcagaccacagtaatgagttggtggcctagcagcctccaaaggtaaccatgagggtttttgcctttttgtaaacctataatcatgaacttatagactttatatttaaactgtttcaacatatggcagttgtgtttttaatactcaaattgtttcatctttggccagtgggagctccttaaagttggctcctattccatttgatatgaccaatagctttggtaatttccttgctttctggtaaataattttcctggctcatttatagatttctggtcttcaaggagccgtggttcttttgagtctgagatagtatttggagaccacagtcttacctaggtgggagaggtgttcttgctactaggttagtcgttagttctaggatttatggtggccagagttaggaaatattatatattaaaaaaaacacaaatatgcaaaattcgcattgtttccaacatttaacatttaaatttccaaaatttaaacttaattttacagttttttcacacgttggatttatgtttgtatcttttttgctgagtcttggtgcctagtgccattaatagaattagttttttttcctcatcctatgttatatataatggtttcaagttaacaggctattttattatcaatatgattcctgaatagtgcttaggatttctttgcaactgtcttttatccttattttatatgtctctaggaaagtgtatagtaaaattattgtatttaaaggcatatgaagtaatttattgtatagttagcctatcaagttgatatctagttggtagttgatttattttattttgtttccaatttttcagtactgcttttttccccattttgatttgttttattatatgcaaaaccttagcataattcccataaaacaagtacccataaaacaatttagctttcatctctgtttcttccactctgcttattttccttccttactgatactgtttttactagttttgagtctatccttccattaaaaaaacacatacctaaaagcaaatctacatggacaaacatacctttctttcttaggtaaaatgtgctattatgtatactgttttccatcttgggtttttcacctagtgatatatgtcctgtagatcccctccttaggagtatgtagagattgttattcctttttacagtttcgtagtactccattggtggatgaatatttaattcgtcccctcttgatagacacttgtgttattttctgctattacaaatagtcatgcagtgaatatccctgtggatatgttgttttgcatttttgccaatgagcctgtgggatagattcttaaaagtagcgttgttggataaaagggtaaatgcatatatcagttgttaggtattaccaaagtctcctctatagcagttgtgttcattttgcattcctacctattatgtatatgagtgcctgttgtcccacagccttgtcatcagagtgtattatcaaacatttaatttttggttaatctggtacagaagaaagggtaacttactgtagttttaatttgtatttctcttatgagcaaggttgaacatcttttcatatttttactgtcatttgtatttttctgtgcattgcttgtttatacctctcgcccatgtttctatagattttttgcctaatcttttataagctccttatatatttgggtaattaaccgtttgtggtaaaactttcaggtactgttgtcatttgtcagttaactttgcttatggcactttttcatataaaagtttgtttttatgtactcctatttctcagactttctcattgttcttcctggattttgaactatagtttggacaattttttaaaaactttaatattttgaaaagtttctctaataccttatttactggtatcagtttaattaggagcctttctggaaaatgcttagtaatactgattgttcatcggaacagccatagtttactggccatggtatatctgacacaatcatagagctttgtaatgaaaacgacaccaaggcaggtacagggacagagagcattgttatcctcctttagacttgaaggttaggcatatcccttctcttagtatgtacacatttattcataattctgtctggagtttttattttcttcctgtgtcccattttgtgaataatttggtcttgggcatatactatgatatttttcctgatctgtaaaatgataaagttaaattagaggcctgaagtgctttctagctcataaagtctatgttaatgaatttcaaagatttgcctattataagacattctatttgtattctttttttttttttttttttttgagacggagttttgctctgtcgcccaggctggagtgcagtggcgcgatcttgactcactgcaagctccgcctcccgggttcacgccattctcctgcctcagcctcccgtgtagctgggactacaggcgcgcgccaccatgcccggctaatttttgtatttttagtagagacggggtttcaccgtgttagccaggatggtctaattttatgtaattatatggcacatgcaaagaagaaatcaaagtgacatagtgcatagagttgaatgatggtcaggttggttaggaaaagaatcagtgatataactatgagcaactcagatgacaaacatccacagaaaatcagcccttactatttgcctgatcctgagaattgatggtgtttggcaccaggcagatggtgaaggtattacagaaacactttgcacattagtaagtttactttatttctcacataggatattactggtccacttccctcctttttttttttttttttaaacaggaatctctatcttagaccattttgatttctaaaatagcaatatttcttatgtgactatttcattattgtgctgctgccacctggtggccacagtagtgatgtcatacttcagtttaatttctttttttattgcaaagacactattaagccaaaagataggctgatatattttaagatatagaatactgtaaaatatataaaggttgcacatcgattgtgactcaattgattgccacaatgtctaggttgaatccaggactataatttttagtttatcatagtcaagttatttaactctctaagcctgttttctcaaagtaatagtatctgtcttttatgagtatagtgaagattgatttagacaatgtgtacaaggcagctgttgaacattcagtaacttaacttctaagtatattattaaatagtcatagaaaatatattaatgtatattactaaatatattaatgtttaagaataacatgacctaaataagtataattttactaatgataattttgaataactgtgatagcactgtcaataagaatagcactttcctacatgttagttaagtatccgtgtatggttgtcaggagcatgctacttacagtggacatttaattggctgttagaacccatgaaaaagctggaagaaaccttagagaatattgttcatgcccctcattttgcagatgttaaaacaagtccgagaatataaagctagttagttgcagagtaggactgtatcctgggtctccatctagtgtggtgtggaccgtgtactgcctcccagttctcctagagtggaccaaaacatggaatcttggttgcattgtagttggactgtattgtgatttgaaagtggagtaaaacatgggaacctttttctttaggtttttatttttgcaattttggtgtaatatgtaggataaaccaactagaaaaaaaatcctccctgtcacgtttgtgcacaaataatttaatactcagtttgttagtatctttaaaaatagatgcaaataaggtgcagtggttctattttccagtcttctcattctcctctgtgtctctggaacaccctgggcatgtctctcactatatttatcacactgggaaagcctttttggctcatttttttctgtcccatactagactattaataccttgaaaggggccatatctttcatcactatatatctagttgttagtacaacattgaattacgtgttgagtaaaataatctacttcttacagcagtataatttttagatgaggattagcccaggggcagaacctctacaccacagtctggttattgtcttaagggtttaaggaaaaagcattttggaatgaaaagtggtttgacattgaacattttgaagatttattataaaaggcgagaagcatacacatattaatcaacactactgagtttaagggtcctctttcctttctcactgtcacctttcttcatggtgtatcttaccctttattttatatttatttatttatttatttatttatttatttatttatttgagatggaatctctgtctgccacccaggctgtagtgcaatggtgtgatctcggatcactgcaacctccgcctcccgacttcaagcgattttcctacctcagcctccccatggctggaactacaggtgcatgccaccatgcccagctaattttttttttttttggtagaggcggagttttaccatgttggccaggctggtctcaaactcctgacctcaggtgatccgcctccctcggcctcccaagttctaggattacaggcgtgagccaccgcacccaactgtatcttgctgtttatatggcagtcttctatctcccgttccctctttctctgctagacccttcatgtagttccccagctgtgaccagtttgcatgggggagagggtaggtaaaagagggaggggagttaagttcagccaaaataatctgccacgtgccatgttgaaatgctgcgttgagctctgcagctgcagagatgaataaaattgggtttctgccctggagggatgaatagtctagtaaggaaaaatagtatgtaaaaaactcacttccagtgtggtgcaactcctatgaaagaacgtattaagcactgggagcaaatgaagtgcagaggtgggagggccctgtggctgcctttcggtggagagaggatgttgcatgcaggaagctctatgagcctgtcttcaggagtgagtaggctttcccatgatagaccaaagagtttaatctcagtacacttcgcattttttatactatctctttaatttttaaaaagctatactttccctctgacatgtgtgaacccatttctttctcattttgttaagggagtttgtgtatccgtctgctagagagatcccacctccacccctgctcacccgacattaggaattaggcaaagaacaatgagatatttgatatttacacggagagagtgtcaaccgcaattcagatatttttaagttattctgttttagtccgaaatagtttgttcctagtattcctgaagtgatgttctttgactgcttctacagtcatcttaagaagtgctgcattttttcattattatgtatgctttcattcacattcttaagttgtaagttagaatgttagaactgaagaaatgaattgtctcatgactgatatttttttctttgtcagttgccaaaacaaaggggatttggtgatggaggctttgttagaaggaatacaaaatcgagggcatggtgggtaagtttgctttttttaaaattaatttttttggttaatacatgattacatatttatagggttcacatgatactttgatacatacatataatgtgtaatgatcaaataagggtatttagtatacctatcagctcaagcatttatcattttttgtgttgggaacatttcaattcttctagctactttgaaatatatagtaaatttttaaagtttaaggaaccttactgtgctagtcacccgactgtgctaattacttaactagttacatactagttacttagtagtcaccttactgtgctatttaacactagagcttactcttctacctaactgtatggtttgtacccattaaccaaacattcttcacccccaaccccttcccagcctctggtaaccatcgttctactctctacctccatgaggtgaacttttttagaccccacatatgaatgagaacatgagatatttgtctttctgtgcctattatttcacttaacgaccaccagttttatccatgttgctgcaaataacagggcttcattcttttttatggctgaatagtattccatgatggatatatttctgacattttctttatccattaatctgctgttggacactcaagtcaattccatatcttggttattgtgaataatgctgcaataaacatgggggtacaagtatccctttcacatactgatttcctttcctttggatagattacccaatagtgtgctttctgaatcatatgtgttgtgagtggtgcaaagtcagacataaccaggtccatacatgtttgtgtcttttctacaagagcaaacttttattgatgctatttcagtcataaaagccacaagctacatggagttcccaaggaggcatttccccctagtactaccagttcactcaatagtcagagccatgggcatacaggctcaagcctctccacaagtcagtcagtattgcaaaccatacataatagtgtattaatatatgtaaatgttgcagtgtaaacattccacatcaaacaaagtaacatttaacaggagaaaaggatagaaaaaaaagggggggggggctaaagaactagtccaaagagaacaactggacaaagagaatattctggcctgatctggacggttgtcaacattcttgcaaggaggagcctttggtgacagatgccaggtgctgatcacaagtgacagccagacaggctgttatcaagacagctgttttgagctggtaaagtcttgctctttttgtggccacagaatcttctggtgataactgatagtgaaatattgtgcctgtttatgtcattatctgattgagtgcagtctttattgataaggtgaacatcgggtccctgtgggcatgatgtcttttgaaatgtgagatgcaatctctttctaaaatggagttacttatgttaagggtgctatatacaatatggtagttctatttttagttttttagaaaactccatttagttttccataatggctgtactaattttacattctcaccaacagcatatgagagttcccttttgtccacatcccccccagcatttgttatattttgtctttttgataatcattctaactggggtgagatgaatcattgtggttttcacttgcattttcctggtgatttagtggtgtcgaccattttttcatacaccttttggccatttgtatgtcttctttagagaaatgtctattcaaatcctttgcccacattttaatagggttttttgtttttttgctgttgagttgtttttcttgtatattctggatgtttagtcccttgttgaatgaatagtttgcaaatattttctcccattctacaagttgtctttgactctattgtttcctttgccgtgcaaaaactttttagtttaactaggtcccaattgtcggtttttgttttggttgcctgtgcttttgaagtcttaaccataaaatctttgccttgaccagtgtactgaagcatttcctctatattttctttttgtttttttagagacgggtgtctcattctgttgtgcaggctggagtacagcagcacagtcgtagctcactgtagcctcaaactcctgggttcaagtgatccgcctgcttcagtgtcccaagtatctgggaccataggcatgtcatctggctaatttaagaaggttttttttttaagagatgagatctcattgtgttgctcaagcagttcttgaactcctggcctcaagtgatcctcctgcctcagcctcctgagtagttgggatcacaggcatcagccactgtacccaatccctatgttttcttctagtagttttatagttttgggtcttacatttaagtctttagtccattttgagttgattttttttttaatatggtgagagataggggtctagtttcatttttctgcatgtgaatatcaattttttccagcaccatttattgaatagggcgtccttttcccattgtatgttattggcacctttgttgaaaatcagtgggctgtaaatacaatttctgggttgtctattctgttccgttggtgtatgtttctgcttttatactaataccatgctattttggttattatagcttggtagtatattttgaagtcaggtagtgtgatacctccagttttgttccttttgatcaagattcctttggctattcagggccttttatggttcggtgtgaattttagtattattttttctatttctgtgaagcatgtcataggtattttgatagagattgcattgaatctgtggatagatttggatataatcatttgaatatattaattcttctgacccatgggcatgaatgtcttttcatttgtatcttcaatttccttcattagtgtttcatagttttctttgtagaggtcttttatgtccttggttaaatttaatcctaggtattttttttttctggtagctattgtaaatgggattgcttttttgatttctctttcagctagttcattattggtgtatagaaacattactgatttttgtatgttgattttgtattctgcaactttactgaatttctttatcagttctaagacttttttggtggagtctttaggtttttctgtatgtcagattatgttgtacacaaagagcaacaatttgacttcctcctttccaatttggatgcctctatttctttttcttgcctgattgctctgactaggactttcagttatgtgttgaatgggagtggtggaagtgggcatccttgttgtgttcaggttcttagaggaagggctttcagcttttccccatccagtataatgatacctggggagctgtcttatatggcctttattatgttgaggtatgttccttctatgcttgagagtttttatcatggagagatgttgaattttatcaagtgctttttctgtatctgttgagatgatcatatggtttttgtctttcattctgttgatgtgatgtatcacttttattgatttgtatatgttgcatacctgggataaatcccacttgatcatgctgtattatctttctgttctgttgttggatttggttggctagtattttgttgaagatttttgcatctgtgttcatcagggatattggcatgtagttgtcttcttttgttgtgtccttgtctgcttttgtcatcagagtaaaggtggccttgtagaatgagttaggaaaatttttctcgccttcaatttttttggaatactttgagaagaattgatgttcttctttatgaagttggtagaattcagcagtaatgccatcaggtcctgggcttttctctcttgggagactttttattcctggttcagtcatgttactcattattggtcttttcaggttttctaattcttccgagttcaatcttggtaggaatttatttcctctaggtgttcctatttgttagcatatagttgtttgtaataatctctaatgaccctttgtatttctgtggttatcagttgtaatattgccttttctgtttctgattttatttatttgggtcttctcttttttcttggttagtctagctaatggtttatcgattttgtctttttaaaaaaccaactttttgtttcattgattctttgtattgttttttagtctctattttgtttatttctgatctgatctttgttatttttttccttctgctaattgggttttgtttgttcttgctttgctactcgaagtgcatcgttaggttgtttatttgaagtctttgtactgtttttattttttagattcaggggtacatgtgctggtttgttaaatgggtgtattgtgtgatgctgaagcttgggcttgtatgtatcctatcatccaaagaatgaacatagtacacaatagatagtttttcagcctttgcccaccctctgcccttgccttcttttggagtctccagtgtctgttgttcccatcttcatctttttttttttttttttttttgagatggagtctcgctctgttgcccaggctggagtgcagtagcatgatcttggctcactgcaacctctgtcttctgggttcaagtgagtctcctgtctcagccttgcaagtagctgggattacaggcacacaccaccatgcccagctaatttttttgtatttttggtagagatgggatttcgccatgttggccaggctggtctcgaactcctgatctcaagtgatccccccgcctcagcctcccaaagtgctgggattacaggtgtgagccaccatgcctggcttattattcccatcttgatgtctgtgtgtactcaatgtttagcttccacttgcaaatgaaaacatgcagtatttggttctctgcttctgtgttaatttgcttaggataatagcctgcagctgcatccacattgctgcaaagaacattttgtttttcttttatggctgtgtagtattccatggtgtatatgtactacattttctttatccaatccaccatcaatgggtacataggttggtttcatgtctgctattgtgattggtgttgcgatgaacatgtgagcgcatgtgtctttttggtagaattatttattttccttcgagtatatacctggtaatggaattgctgaatcgattggtagtctcattctatttttagttacttgagaaatctccaaactgctttccacaggggttgaactaatttacattcccaccaacggtgttgccttttctccaccgcctcaccaacatctgttattttttgactttttaataatagccattctgactggtatgaggtggtatctcattttggttttgatttgcatttctctgatgattagtgatgttgaacatttttcaagttccttgtagtttatggatattagccctttgttggatgcatggtttgcaaatacgttctctcattctgtaagttgtcagttcgctctgtcggtagtttttttttctgtgcagaagctctttagttaggtcccaattgtcaatttttgtttttattgcatttgcttttgaggacatatctttttgagtcataaattctctgcctaggccagtgtccagaagagtatttcctagatttttctcctaggattcttatagtttgagatcttacatttaaatctaatccatcttgaattaatttttgcatatggtgaggaagtgtaggggttgagtttcattcttcatacaagtagccagttttcccagcaccatttattgaacagagtatcctttctccattgtttgtttttgtcagctttgttgaagatcagttcattgtaagcgtgtagctttatttctggttctctgttttgttccattggtctatgtgtccatttttgtaccagtatcatgctgttttggttactatagcattgtagtgtaaagcaaggcaatatgatgcctctagctttgttcttcttgcatagggttgctttggctatttgggctcttttttggttccatatgaattttaaaatagtttttttctaattctgtgaagaatgacagtaatttgataggaattgtattgaatctataggttgctttgggcaggacggccgttttaactgtataaattcttctaatccatgagcatggaatgtttttctatttgtttatgtcatctgtgatttctttcagcagtgttttgtaattctttttgtagaggtttttcacctctgtagttagatgtattcttagatttttttttatgtgtggctattgtaaatgggattgtgttcttgattcagtactcagcttggacgttattgctgtatagaaatgctgctgatttttgtacattgattttgtattctgaaactttactgaagcttgtttatcaggtctaggaacattttggtaaatctttagggttttctaggtaaagaatcatatcatcagcaaagatagataatttgactttttcttttcctatttgaataccttttatttctttctcttgcctggttgctctggctaggacatcaagtactaggttgagtaggagtggcaagagaggacatccttgtcatgtcccaggtgtcaaggggaatgcttttaacttttgcctattcagtatgatattggctgtgggtttgtcatagatggctcttactattttgaggtcggttccttcgatgcctagtttgttgagggcttttaacgtgaagggatattaagttttattgaatgctttttctgcgtctattgaggtgatcatatggtttttgtttttaattctgtttatgtgatgaatcacatttattgatttttgcctatgttgaaccatccttgcatcccaggaataaagcccacttgattgtgatggattatctttttgatgtgctgctggattcagtttgtattttgttgaggatttttgcatctatgttcattagggatattggtctgtagtttttttttgtttcatctttgccagattttggtatcagggtgatgttggtttcatagaatgagttagagatggatccctgctcctcaatgttttggaatagtttcagtagtggtactacctcttatttatatgtctggtagaatttggctgtgaatccatctggtctggggcttctttagttggtaggctttttattactgatttaattttataactcgttattaatctatcgaggatttctctttctccctgtttcaattctgggaggttgtgtgtttccaggaatttttccatttcctctagattttctagcctgtgtgcatacagatgttcatagtagtctgtgaggatcttttgtacttctatgggattggttgtaatgtcacctttgtcatttctgattgtacttatttggatcttccttttttttggtgatttagctagcagtctatcaatcttgttatcaactgtttatttcatttgttttggtctcaattttgtttatttctgctctgattttagttacttctttttttctgctggctttgggtttagttcttatttttctagttcctttaggtgtgacattacattgttttaggttgttaacttgagatcttaatgtaggtgtttagagctgtaaactttcctcttaacatggcaaagaattttttcatatctgcctttgtttacccaaaagccattcaagagcaagttgtttagtttccatgtatttttgtggttttgagaattcctcctggtattcttatttttattgcactgtggtctgagaagatacttggtgtgatttcaatcttttttttttttttttttttgtctttgtgctgttttgatgtaggcatctattgctataaacactcctcttagcactgcctttgctgtatcccataggttttggtatgttgtattttcattttcatttgtttcaagacatttttgcatttcttttttaatttcttcactgacccagtggtcattcaggagcatgttgcttaatttccatgtatttgtgccgtttccaaagtttctcttaatcttgatttttagcttttgtccattgtggtctaagatacttgatatgattttgattttaaaaaatttgttgaaacttgttttgtggcctaacatatggtctatcctggagaatgttctgtgtgctaaagaatgtgtattctgcagctgttacatgaaatgttctataaatgtctttaggtctctttggtctgtagtgtagaacaaactggatgtttctttgttgattttctgtctaaatcacttgtccagtgctcaaagtggggtaccgaagtccccaattattattgtattggagtctgtctctctttagctctaataatatttgcttcatatgtctgtgtgctctggtgttggatgtatgtatatttacagctgtaatatcttgttgctgaattgatcccttttcattatataatgaccttctttgtcagtttttatgtttatatgacttaaagtctattttgtgtgatataggaataactactcctgcatgtttttggtttcccatctcttcattttcagtttatgcgtgtctttacagatgaagtgagcttcttttaggtagcacatagttaggtcttgctttttatagagatattcagccattctatatcttttaattggggaatttaaaccatttacattcagggttgttatagataggtgaggacttaactcttgtcgttttgttaattgctttctggtggtcttgtatatcctttgttcctttcttcttcctttattgtttacctgtgtaatttggtctctctctcttttttttttttagtgataatgtttgatgcctttctctttctcatttgtgtttctcctccacgagtgagtcttatactttttgtgtgttttcacgatagtagatatcatccttttgcctcatgatgtaggaatcccatatgcattttttgtagggctggtctagtgatgatgaattatctcagtttttgcttgtctgggaaaaactttatttctccttcatttttgaaggatggctctgttgggtatagtattcttagacaccagttttatttgttttcttttaacactttgaatatatcgccccattctctcctggtctgtaaggtttctgctgagaaatctgctgttagtctgatggcaatatccttatatgtgaggaactcacagaacatctgacatttttctcttgctgtttcagagttctttgtctttgacttttgacagtttgactataatgtgccttagagaagacctttttaggttgaatctatttggggatatttgagcttcctttatttggatatctatatcttttgcaagaattgggaagttttcagctattattttgttaaattggttttctgtacctatgccatcttttctcttgctggaatagcaagaatttggatatttgatcactttatggtctcccatatgccatgtaggctttcttttttcttttttattctttattcttttgttgtttttgttgttgtctcatggggttatttcaaaaggtccatcttcaagttcagaaattctcgtacttgtttttactctgttgttgaaactcaattgcatttttaaatttcatttattgaattcttcagtttcaggatttctgtttggctctttttaatgatatccatctctgttgaatttctctttcagaacataaattgttttcccgatttatttttattatctgtgttttcttctatctcactgagtttatttaataacattattttgaattcttttataggcatttcatacatttccttttctttgggatctgttaccagagaattattgtgttcctttgaggtgtcctttttctttcctttttcatttttcttgtgtccttgtgttgatttctgtgtatctggtataatagtcacttcttccaattatatggattggctttcatagggaaaatttttttcatataggtgtatctatagtgttggttgggtagggtgcttttgatttgattctcagtgggtgcaagagtgtagtttctatgatttttccagccataatcagtatcagtggtttctgtgagtttttcagtgacttggactgtgattgtcagtggaggctatagcaaggctctgctggggtagggacaccaggcagactggtcatcacgtaccagacagtgatgccagtggcaggcaggatgggcttgtcctcaggctcccagatggcatgcacaggcactgatagtagcaggcagggcagatcaatccccaggcccgtgggtgacatgcacaggcaccagtggtggcagtagtgggtgaggcaggcctctccaaggtccctggatgatgtccataggtgctggcagtgatcacggtaggttgattctaagtcacctagtggtggcaggaggggctaggctgatcaccagtgcctcagacaatgtgcctggtagtagtgatgggcacagcaggcctgtcctcaggtccctaagtggtgtgtgtggactcccagtggtaagttttcttttaaccttaagcttctcactgcagtttaaaaaacttatctgagttgtgcctctgaccatattgtgctttgggtacagaagcaaaagtgttgagcaaaagctaagttgatccatgtcatggtcacagcattttggggggactttttttgggttgtttgcctcatcacagcagtgtgaagctagttgtttgcctacatcctatcttgagttttctactcttaagaagcaaaagtacaaaggttctgtcacactaagaacaggtgctttttgaaagtatttaagccttactgagagctgtcttgtggccatttctggaaacctctttgaatctaatatatctgtgtccacttctgtttctcagcaatatctggcatctcctgaaatgccaggacatcagtaggtttacaatagtaaggtagactacagtaagtttctgacagaaaggtgggcagaaatagttgaaataaatctggctgaaggatgaatttcttgaagcagctcttacaattgtattatcactttcctgcatgatagtctgctttcttccaaggctttttcctttagctagatgaaaatgtgatgtataggcttgtctggatccttcctgaaagcttccttaatatgttacagaggcgcttgttggctgtagcagcctggctccacaaaccagacttaaaacatcaatcttgtgcttaaccaaacaacttgggctttaggttggctatgagaggaagataagatattctgtggaataagtaatcatcttaatatgagcattaaaagtaaaagctcaggccgggcacggtggctcacacctgtaatcccagcactttgggaggctgaggctggccagatcacctgaggtcaggagttcaaaaccagcctggcctacatggcaaaaccccatctctactaaaaataaaaattagccgggcatggtggcgcatgcctgtaatcccagctactcgggaggctgaggcaggagaattgcttgaacccgagacgtggaggttgcagtgagccatgatcgtgccactgcactccagcctgggcaacaagaatgaaactccatctcaaaaaaaaaaaaaaaaaaaaaaaaagctcagcaatcctattctttgcttctggtaatttattaatttacattaatgtcatttaattatttacttcaggtagatttacatctgctatatttttacatgaaaaagatgaaaagccacttgaacatatcttctgtttttttaatgatctgttcttctttataggggatttttgacatcttgtgaagcagaactacaggagctcatgaaacagattgacataatggtggctcataaaaaatctgaatgggaaggacgtacacatgctctagaaacttgcttgaaaatccgtgaacaggaacttaagagtcttaggagtcagttggatgtgacacataaggaggtaaagcaatttatttgttcttctttttgacatttttatcttgtcttttatattaaatgtgtttcttaagtatttgttgaagaaagaatttgtataccaagttagtttattgttttttattataattctgctgttttattttagaagaaaaattcattgtgaaaatgtataagaatgttatcatttatttcaaggatcattttaccttggttacatataatatatacataacttctttaagaaaatgtaaaagggtaccacacattgtttgtttaaccttcatcatattacatgtttatattaacattcactgagtttcatggaaattgcttttggcttcactgtatggctggtattacaaaagaagttccagattaaagaatttgcctcttttggttagatttaaaacaaagttaagagaatctttaaaaaaaaacaaaacaaaacacgtttaccatgttgaaaattagaggagaagaaagaaaagaagaaaataaaaattacttgcagtcccaccactcattgatattggtaatttgggggaaaagtttaataatatttgctggttgccttctcataaatttagctggtaaattaggaggaagtacacagaatattggaagggaagtagaaagcatttatgtgtgagagttgcctgttaatttttggtatggatgtcaatctcagaaggattggaagagttagagttataggggagcactggtcccatttctcactctgaagaccttttctaccagtagggtcaccattcattaaggctgtcatcagcttattcaggtacacttctgtgagtggtacacactgagattgtgattttgttgagaaaacttattaagaatagtttagaaatgtttctcgtaacaaagagtttgacttgttaaaaatgttattatgcttacccagaaaatttctccttggttggccatttgcaacttgggtcaaagtagtgcgtggcaacactggctgtatcaaagttttctgctaatgctgtttgctaaattgcaattaatttaaaatttgactaaaactttgagaatatattttaaaattacacaccatgcgaaaatacagaaggtgatgcaaaagtacagtgaatggtgatcttgtttgattttttaaaaatcataatttaggcagggtcaatgttccttttatggtaggctacttagctagcactttgtttctcctagggcaaaacaaaattctgtttagcaagttgaaatgaaagtggttttctggttgataaatagattgtttattttgttagaaactcattaaagaattatgtgtgattatgataatatttagtcactgtaatgctaaatttgaacttattcctgtggcttagttttgacgccacgggcattgttgccgttacttaatgcccttgacatcaaaatttctctcaaagagaaattaagagagatttaagggattaaatggatagattccatggtaaggatatgaagatgttaagtttggcctggggacatacaagaaatttagaattgcagctctctggttaatttgctacttcattgattgggctgctgaaagttgattaagtttctagaagtaggtttctgaagataatctagtaatgggaatctattccatagaatttgtgtgtgagattgtgttgtattacaacacttctttcttgctttttttttttttaaggaacaaatgtgtttattattgtgctgaaaaattatgaccaccaacaaccaatgaagggcaggaaggaacaacactatgagatcatgaaaatattttgcttcttgtattagtctgttctcacattgtgataaagaaatctgaggctgggtaatttataaaggaaagaggtttaattggctcacagttctgtagaaacatagttgcttctggggaggccccaggaaactttcagttatggcggaaggcaaagggaaagcaggcctatcttcacgtggtggagcaggagagagagagtgaagtgggaggtgctacacacttctaaacaaccagatctcaggaaaactcactacaacgagaacagcaccagtggggacatctgcccccatgatccagtcacttcccactaggccccacttctaacattggggattatagttccacatgagatttgagcagggacacagacccaaaccatatcacttgtcaacaaactttcttctcttgctttaacatttttgacgattctttcccaaacctattaagtaatgatgatggttacaaattttccagttctaccactctttccagtgcattattttttatatcttcattaaaggagcaaagcaaatcccctacttgtaataataagacaatattggagactgccattaaaacacaggagaagtaaaaaaacagatctgttccaagacacacaggactataaatttaggaaatacacagaaaattaaaagttaaactcaattggatacattaaatatgtgcagctttttgtatgtcaatcatacctaaataatgtcattttgaaaacaaatggtccaacctgtaccaccaacaggttttgagtatatataaatctaatatgtatttatgagtagggagcaaccttaaacattttaaacagcagaaatacacaaagcaattataggtggaagtaatacaaagtgccttgtgtttctatcctagaatcaaactatagaagtctcaggttattaagaaaacaaatattgttttgaatattaaaaatcatgtgttttggagagggagagaattaacagcctttctctgccttagaatactttacattttgtgaaatttacaatcagaatggagcatctcctaaagttgtcagtatgctagggagggaaattgagcacaggagcaaaccactgttttcttagtgctcagctgaagaaattttcacttaaaagagctgtagctgttgaagtcatttccattttagaagcgtactataaatgactttttctatgtattaactagaattaatggtaatttgtgaaatgttttatcatttttaaaattagagtctatatctcagccagtgaagcagcaggcactgctgcatgtcatagtctaacacctgcaatccaccagtctgcatggactgtaagcaggtatggagagaaccggagttcacctatcagcaacaccaccatggaatcgactgttgagcctttctactattaattaccatatatgtgccttttttctggtattttattcccactggatgctttttattaagaccttgtacctgtgaacacatttggggcacaacttactgtcttcaaggtgcaggggtgggaaattgggaggcgggaagcaagaagagtgcactcactctcccttcttgcatttctggagcccaggcttgtctagcatgaaactggaggtgaacccaaccatctgtatctgcagggagacttctcccatggtcttctcttgtggagattcctctgcctctggtgtcccaccctggctgcagttctggccctggaggccagcaaagcacctggggtagaagttttcttacagctgtattaactccttcaaggagagcagcagactcttccaaggcaggcagcacccccccaagagggaagagccatctcaggaggatgtctcctcagaacttttcagggacgtttaccccttgtccacctttgattttttttttttgtaatgatttctgaattctggcctcttttgctgtgctacgaatgtccttttattttgggtaggtgaaggcacacgggtgcttatgtgcatctaatttctggcctttggtgctcagctttaattgttggcaccaggcacacagaatgtcctggcgaatcaggttaatgggtagcagtttagagggtaatggagggattgatatcttcttctgaggttttaggttgttgtcactgaactctgccttcctctttgggcagagcactttgtcaccttttcatttggtcccctttgctgatgttcctggcaaagcaattgtgcttggttaattagaagtttactaatcctcttcccttgacttctctgtggatttccactctttgcctttttgacttctccatactcggaaaagaagtggaggttgacgaaatttttccagaatcaaaatacttctttcaagtatgtgttataacacattcataatccaatttgagcagtatatgaaataagaactagaaaatagggctttatgtttttgtcattgtattagttcattctctcattgcaataaggaactacctgagacagggtaagctatgcagaaaagaggtttaattgactcacagttccacaggctgtacaggaagcatggctggtgaggcctcaggaaacttaatcatggcagaaagtgaagaggaagcaggcacattttcacatggcggaggaggagacggagcaaagggggaagtgctacatacctttaaagaaccagatctcatgagaattcactatcacaagaacagcaagggggaagtctgcccccatgagccagtcacctcccaccaggccccttctccaacattgaagactacagttcaacatgagatttgggtagggacacagccaaaccacatcagtcattcttacttgtttgaaaggtacagacctagaagcacttagtcctagggtgtaaaccactgctaatcgaatgacaggtccatgatgagattaaaagcttgcaccagaatgtaaatnnnnnnnnnnnnnnnnnnnnnnnnnnnnnnnnnnnnnnnnnnnnnnnnnnnnnnnnnnnnnnnnnnnnnnnnnnnnnnnnnnnnnnnnnnnnnnnnnnnnnnnnnnnnnnnnnnnnnnnnnnnnnnnnnnnnnnnnnnnnnnnnnnnnnnnnnnnnnnnnnnnnnnnnnnnnnnnnnnnnnnnnnnnnnnnnnnnnnnnnnnnnnnnnnnnnnnnnnnnnnnnnnnnnnnnnnnnnnnnnnnnnnnnnnnnnnnnnnnnnnnnnnnnnnnttttgtaagttaaggctttatgtgtttctggttacagtgttggcactgggttggttttaatggacattcctgctgttactatcttctagctccctacagggcacgttgactttgtgaaatgagtaagaaattcagagtcctggccctgcctcttttcagctgaatggccttggacaagtaacttccatcattattagcatttaatgttcctaaacttttcttcacctttatatttatacttgtcacagtaaataaaaagaaaaatgattctacaaggctcataagaaaaaatagtaatcttccccacccctctgaacctaggattcttacttctgtgaggagtaatttcaagcctttaactctttcttttggcattttccctatgtttccaaggaagcttttttactgctgtattttcatttatagttttagctgtttaatgacttggtactatgaaagatgtggggttttgctctcttacatacaattatcatcccctcatccttccaggagtgtatatcttaattttttgttagattaatattcagtatttacatcattaaatggtaaatattattcacagttgagtcaggtagtgtaattataagcagacttgttttttgtactgcttttttgttttcctggaaattactaattgtctcactttcatttggttttttaaacatacctaccattgattctttctgaaatctctgacacaggtgtaaatcttctgccattgtgtttaaacaaggcaattaatctgtccattttcttttctttcatttcttttccctgtgaagacatctctcctggagcttgccattctccaccgtggataggttgctttcaaggataggtgtatagctgtcatcatgagaactcccttcatcattattctggaggttttctgtgctcctctatttgtgcttctttgcattctctgtcaccatatttatatgtttacatttctattttgatagagcatagttttgagatcttgtatatctgaaaataatctttattctattttcaggcctgattgaaagtttgactggctgtagaaatcagctttagaagtaaatttccctcaggacgtttacagttaaatatgaattatttcagactttaatatttgataatggcagattaggtaatttgggccagtccactcaccgaggacaaataggtaagttagatttaaaaaaatttttgcttgaagtaaaatgctgtcaggatggtgaacaattaccaggctgggatctgggctgggcaagaggttcagggaggtgtgtccagggtttggggccattattaactgaaaataaagaaggcagccgagaggataaaaggttgagtggtgtttttgataactttaaggggctaggggtccatgatggctctgaacgcctcctcagtttggctaaagaccctgaaaggctgcaccctaggagtaaggatggaccagaacaggccctcttgaaaaaaccactcagcttcaaacatctaaatccctgaaatcagttttaagttaaacttaagagtgctactgtccccaggcatctccaaagtgctagggcttccaggaacctggaagtagcaaatataaattttcttcaaaggaaaaattaccattctgggtttcagattattcaaataattttgcaaataatgcttggtacttgctcagaaaataacctgagacaacaaagaccaggagagaagacaacacaaaggaaaaatagtagaagcagcagaagatagaaatagacccatgataaatctagatatttgtcattatgatgcacacagtttacaataacaatgtttattgcattcaaggcactaaaagataagattgagcatttcgaaaaagaattaaaaactgtaaaaaaaatgagtggaaattttagaattgaaaaatagaatgactgaaattaaggtcttaaagattaagggataattagtgaactagatgatgtgacagaataaaatgtctagaataaagcacaggcaaagtgatagaaaatatagatgaaaggatatgagaaagagaagacaacaagaaagtctaatataagtgtttttggaatccctgaaggagaaaaaaaatgagaattggcacaaaagatatttggagagatactggctgagattttgccaaaagtgaggaaggtcaagtatttaagaagtccaagaatctcaagcaagataagtaaaaagaaacagttgccatggttgaaaactaaagacaaagggaggaatctgaaaagcaatcaaagaaaaaaaagattatctacaaatagctcttaacagttgacttgtcagccaaaaaagtgaaagccagaaaacaataaaatgtctacaaagaaagaacatgactttttcctctaccaaacgagaattctgtatccagaataaaggtaaaataaagacattttcagatgaacaaaaattgagagaactggttacaagcagacctgcactaaggaaatattaaaaaatgttctttaggtagaaagacagtgatcccagattgaccctcagagctgcaggaagaaatgaaaagcagtagtaaatgtatgggtaaatctaaatgaatattgattgtataaaacaacaataatagatggagttttgctatgttgcccaggctggactcgaactcctgggcttaagcaatcctacctcagcctcccaagtacctgggactacaggtgcatgtcactgtgcccagctaacggtaattgccttttgagtttaacgtatatgtaaaattatggtggcaatggtgttatatttaagtcaggttgggataaatggaattgaagtatttatagctaacattagaccttgttaagtcacaaatccatgtttttatcttgagggaaccattaaaagtatatattagtagagaatatcttccatgctaatagagaaaaatggaatgataaaaaaagtaatcagtcccaaagaaggcaaaaaagaagagaaaaaggaacagagcttattaagtacaaatattatgtaacaagatgaaagctttaaatcaaaataggtttgttaaatgtaaatgcagtaactggcttaattaaaagaaaaactgtccaactggatcagataaacaaatgcaattattatttaatgtttatagaaatataaaaacattgaaattaaaaggtaaaatatataacatgcaaacagtttgactagaaagatggtataactatattcttatcagaaaaagtatgattggagcagaagccgaaagcattactcaaggtgaagaaaaacacttcataatgagaaaatgtgaaatttcaggatatgtaactttagtagacattctttgtgccctgtagtatgtcctctttgcctcctgatttccttttagctattaaatataggtccttatgcgctgccaacatctactataacaggagtttccaatcttttggcttccctgggccagattggaagaagaattgttttgggccacacataaaatacactaacactaatgctggctgataagcttaaaaaaaaaatcttgtaatgttttaaggaagttcacacatttgtgtagggctaccttcaaagctgtattgggccacatatggcctgtggcttacaggttggacaagcttgtagtatactttgtttgaaggggtgggttgcccctccacacctgtgggtgtttctcgttaggtggaatgagagacttggaaaagaaagagacacaaagtgtagagaaagaaaaaagggggcccaggggaccggcgttcagcatatggaggatcccgctggcctctgagttcccttagtatttattgatcattcttgggtgtttctcggagagggggatgtggcagggtcataggataatagtggagagaaggtcagcagacaaacatgtgaacaaaggtctctgcatcatgaacaaggtaaataattaagtgctgtgctttagatatgcatacacataaacatctcagtgccttaaagagcagtgttgctgcctgcatgtcccacctccagccctaaggcggttttcccctatctcagttgatggaacatacaatcgggttttataccgagacattccattgtccagggatgggcaggagacagatgccttcctcttgtctcaactgcaaagaggtgttccttcctcttttactaatcctcctcagcacagaccctttacgggtgtcgggctgggggacggtcaggtcttacccttcccatgaggccgaatttcagactatcacatggggagaaaccttggacaatacctggctttcctaggcagaggtccctgcggcatttgtgtccctgggtacttgagattagggagtggtgatgactcttaaggagcatgctaccttcaagcatttgtttaacaaaacacatcttgcacagcccttaatccatttaaccctgagttgacacagcacatgtttcagggagcacagggttgggggtaaggttacagattaacagcatctcaaggcagaagaatttttcttagtacagaacaaaatggagtctcttatttctacttctttctgcacagacacagtaacaatctgatctctctttcctttccccatactttgtttctctctctggggccttggaaagctgcttagatgaaatctggaagtgttggggagttaatactcttagatcttaggtcaaggttcaagtagtggagggactaggtgaattctccaacttcccattcctcagagagacgattctgaaagattccatctggttccttagtggattcccagtggaattcatcaccagctgcttacttcagtaatatgcttaatatgctcaataccacgtcctttattagctttccttccttctctgccttgctctctgtgtcctcactgtgctttctggggtcacctccagttgccctgaagtccatgtctcagcccacactttgctgggggactcaaaccaagatgaaaatgtctgcgtatctaatgtgtctagttaaatagttttaaaagaaaatcctctttctgtcttatctgtatgtgaaaagtgacagaactaggaaaaaacagatgaagccacaatcataggggagaattttaacacatttttcttagtaactgatggaataagagacaaacataagaatatagattttaacagcatgatcagtgaacttgacttaatttttatatatagaatattatacaacagaatttcagagtacacattcttattagcacaaaaaatacccttaccaaaattgaccatatgctgggccataaagtaaatcttgatacagttcaaaagcttgacgtcacaggtgtggtctctgaacatagtggaaataagttagaaaaagataacttgaaaatctgcatacatttggaaattaggacatgaagttctgaataattcatggatcagtgaggaaatcacaatggaaattagaaaatactttgaattcaaaatgaaaatacaacatcagacatacagaatgcagataaaatatctcagagggacatttatagccataagagcatatattagaaaagaggaagggctgaaaatcattgaggtattgattcatctcaagaggttgggaaaagaacttgctaaatttgaagaatgtaaaaagaaggacattttttaaaaatgaaagtaaaagcctggaagtgatatgacatgagaaaacttccaaaagaaaactgatgtaactgtattggcatgagacaaagtaaacatcaaagccagaagcaatactaaagatctagggacacttaaaaattatgaatgggtcagttaaccaggttgctttaataattcaattctataaatacttaataatgtagccttaaaatatacaaagaaaaatgggcagaatcaagggaaaaattaagtacatggtaatcatggaagacttaacaagtagctctcaattaatacaacaagcagagaaaacctcagttcaggtgaagatttgatcaagattaacaaacttaacctagttaataaacttgacctaattaatctaaatagaacattgtacctagtaactgctggatacacatccaagtgaatatggaccatttaccactactgccgtaaagcatgtctcaacatatttcagaggattagcatcatgttttttgaccaaggtggatttaatctagaactcagaacaatgaaagacatccagaaaaaatcctcaaaagcttggaaattaagcaatacacttctaaataacccatgaatcaaaagaaatcaaaatgaaaattagaaaatattttggactgaataataatgaatatggtacgtatcaaaacttgtggaatgcagctaatgtggtgcctagaatgttagctatgtgtgtatacatatagctacattttatatacagctaaaattatatatattagaaaggctgaaagtgatctaagtagccatttcaagaaaaacaaaaaaaccccagcaaattaaaaccaaagaaatgagaaagaaaagatgtaataaagataagaacagaaactaataaaataggaaacaaatgtataagaggatgaacaaagctattctcttcgaaaaaaattaattaaattgataaccttggcaagactaattaagaaaaaaggggggaaaataactaatgttagcaattaaaaagagaaaccataatagagcctctgaatagtaaaggggttataaaaagatactatgaatgaccatgtacccacccccccaccacagtaaaacatttagatataataaaaaatccctaggaaagcacagcatacaagaaaggttgagacatgtgaatagtatcctattaaattgattttttttttgttttgagatggagtctcactctgtcgcccaggcaggagtgcagttgcgtgatctcagctcactgcaacctctgcctcctgggttcaagcgattctcctgcctcagcctctcgagtagctgggtctgcaggtgcgcaccaccatgcccggctaatttttgcttttttttttttcttaagtagaaatggggtttcaccatgttggtcaggctggtctcaaacttctgacctcaggtgatctgcccgcctcagccacccaaagtgctgggattacaggcgtgagccaccacgcccggctgaattgaatttgttattgaaaaacctgctcatagataaatctcttgggcccagtagacttcattggtgaattctaccagacattttaagaaataagtaacatgaattttatataaaatattccagagaacagaagaaaagataagattttcctaactccttttatgaagcatcataatctttatttcaaaacttaacaaggatgtagcagttaaggaaaattacaggccagtcttatgtgaatgttaatataaaactgttagtcaaaatattaacaaactaaatccagcaatatttagaaattacatactaacttaggtttattctagtcattctgggttgtttcaacattcataaatcaacataattcatcatattatcagaggaaaaaacaccatagttatctcaatccaggaaaagaatttaatgaaattcagttatccatttgtgataaaaatattaaaatcccttagaaaattagaaatgttaagggaatttccttaatctagtaaaatggtatataagaaacatagcaagtagcaattaatgtaacccattgttagaagctttccttcagagattgtgaatgagacaaggatgcccagtatcaccactttttttgttgttgttattgtagtggaggtgtagctagtgcaataaagcaagaaaaataaataaaagacataaggcttagagaggaagaaataccactgcagtaattagcacatgctttgttggtgtacacagaaaacctaaaaaatctatgtagacagaattaacaaatgaaatagtagatttgctgagttaaaggttaatttacaaaaatttattgattctttgtaccagcaaaaagcaattaaaaatgaagttaaaaaagatacccttgacaagagtatcaaaaaagcaccaaatagagtaaatccaatgaaagaggtataagacctctgcacagaaagctctaaattatggagagaaattaaaactgatataaatggaagaatagatgttcatggatagaaagactcaatattttaaaggtattggtttctccaattttgatctattcagtattattctaattaaaactccagtatattttaaagtgaaaatcaacaaggttgattctcaaatttatatggcagtagccaaaacaatcttgatgaagagaaattaaggtggagcacttagggtactagaaaacaagatttattaaaaactatattaagacagtgtggtattgcaaggatagaaaaacagaccaatggaacagaataaagagtcccgtaacagagatcccacatatgtgaacatttgattcatgacaagatgacactgcaagatggtggggagtcttttcaatacatgtcactggatcaactgagtaacaatatgggggaaaaagaaagattttgacttctagttttataccatataccaaattcaattctagatggattacgaatttaaatgtgaaatgctgaagattttctagaagatgacataagagaaaatcttagtgccttggagtagggaaagatttcttaaaaaatagtgataaaaggttactaatttagactatattaaaataatgaacatttcatatatttacaacatacaaccaacaaaagataaagaacatctataaattaataagttaactgagtagaaaaatgggcaaaagacaaatagtcatttcacaaaggaagatatcaaaatgaccagcgagcatgtgaaaaggtgcttggtttcacaggttactaggaaaatgcaaattacaatcacaagataaccctaaacatacaccagaaaggctaaaagttaaaagactaataatactaagttactataggggtatgaaacagctcagtattttatcaaaaagagtgctgtacttttctgtgcaaatatttactttcaatttaattttgttttaaaaagcaacagtcaattcccattttcagtagtagaagatacacattttgtgtattttttcccatgggtattctggattgttccccgttgggcctggaagtttggaaatggttgaacatgacttagcatgtttgctttctgctttaaacactaaaagtccttgtcttttcacattttacatttatgcaaagtacatttgtatttttctccttgcttatttcttttatattaatatattctgtttacatgcataatttttcccactttgttttattctagaactcttgtagtaggaagtactagaagatctgtgaatatcttagtcttgttaccttcattaacagctaatattctcacttctgtttaatgatcagtgacttagtattgcataagaatcaatagtccaattaactaaattgaagcgctcatttctccctttcagtgttactgaagttttattttctgggagggggatgttgaattccacattattgtttttagtgttttttcagaatcatttttccagaatactttttacctttttgaggatggactttttgcagtgcactttaactgtatagagtgtgcaaatgacatttcagctggacttgggggagctgttctggcattttggtttgcaaatcaaacatgcactctcttttagtctcttttctttgtatttcttctcattgtttcttttggatctggtactgtcatctgcatttcttcattaattaacaaatttgcctggagataatttttactgctccttgtcttaaaaacattttacttcctacctttctccttgtcaataaacaggatatatgtaatttgggatttatctaatctgttagtgatggatgaaaagactcaaagtgccaagagatcaggaaaattcagatcaatccaggcaggaggaatcattaggtgtgactctcagaaggacagggatcttcaagtgggtcacagggtcagactggcaaagcgttttcttctggatgtgggttcacaagggatataggtgattctagtgaaagaagagagccaaatgagagtgattgtgaagcgttgtagtcagaaatgtgattgtttttctttttttaaaatttaaattttattttaaattcaggggtacatgtgtaggtttgttatataggtaaacttgtgtcgtgggggtttattgtacagattatttcatcacccaggtattaagcctagtaccccttagttatttctttcctgattctctccctttaccctccagtaagcctcagtatgttgttcccctctatgtgtcccatgcgttctcatcacttagctcccatttataannnnnnnnnnnnnnnnnnnnnnnnnnnnnnnnnnnnnnnnnnnnnnnnnnnnnnnnnnnnnnnnnnnnnnnnnnnnnnnnnnnnnnnnnnnnnnnnnnnnnnatttacatttttttgggtatatacctagtaatgggattgctgggttgaatgatatttctgtttttatatctttaagggatcacccatcatcttccatagtggttaaactaatttacacttccaccaacagtgtataagcgttctcttttctctgcaaccttgccagcatctgttatattttgacttttaaataatagccattctgaccaatgtgagatggtatttcattgtggttttgatttgtgtttctcttaagatcaatgatgttgagcatttttttatatgatggttggctgcctgtatgccttcttttgaaatgtgtctgttcatatcttttgcccagtttttagtggggtggtttgtttttttcttgtaacttttaagttctttatagatgctggatactagtcttttgtcagatgcatagtttgcaaaagttttcttccattctatatgttgttcactctgttgatagtttcatttgctgtaaagaaactctttaattagatcccatttgttgacttgcttttgttgcagttgcttttggtgtctttgtcgtgaaatctttgtctgtttccatgtccagaatggcattgctggggttgtcttccagagttttttatagttttgggctttacacttaagtctttaatccatcttgagttaattctgtatataatacaaggaaggggtccagttgcaatcttctgcatgtggctagccagttatcccagcaccgtttattgaatagggagtcctttccttattgcttgtttttgtcagttttgttgaagatcagatagttacaggtgtgcagccttatttctgggttctctattctcttccattggtctatgtatctgtttttgtaccagtgccatactgttttggttactgtagccctgtagtatagtttgaagttgggtagtgtgatgcttctaggtgtgttctttttccttgggattgccttagctattcaggctcttttttggttccatatgaattttaaaatagtttttcctagttctgtgaagaatgtcatttggtagtttaataggaatagtgttgaatctataaattgctttgggcagtatagccattttaatgatactgattcttccttccatgagcatggaatgttcttccatttgtttgtgtcatctctaatttctttgagcagtgttgtatattttttctatagatttttcacctccctggttagctatattcctgggtattttattctttttgtgacatttgtgaatgggattgcattcctgatttggctctcagcttgactgttcatggtgtatagcagtgctgtgacttttgtacattgattttatatcctgagactttgctgaagttgtttatcagcttaaggagcttttgggctgaaactatggggttttctagatagaggatcatgtcgtctacaaacaggaatagtttgacttcctctcttcctatttggatgccctttatttctttattttgcctgattgctctggccaggacttctaaaactatgttgaataggagtggtgagagagggcatccttctcttctgctggttttcaagggtttccagcttttgcccattcagtatgatactggctttgggtttgtcatagatggctcttactattttgaggtgcgtttcttcagtacctagtttattgagagtttttaacatggaagggtgttgaattttatcaaaagccttttctgcatctattgagataatcatgtggtttttggctttagttctgtttatgtgatgaatcacatttattgatttgtgtctgtcgagccaaccttgcatcctagggatgaagcctacttgactgtggtggataagctttttgatgtgctgctggatttgatttgccattattttgttgaggatttctgcatcaatgttcatcaatgatattggcctgaagttctctttttttgttgtgtctctgccaggttttggtatcaggttgatgcacaacccatagaatgggttagagaggagtccctcttcctcaattttttggaatagttttagcaggaatggtaccagctcttctttctacatctggtagaattcagctgtgaatccatctgaccctgggctttttttggttggtaagctatttattactgattcaatttcagaacttgttattggtctgttcaggggttcagtttcttcctggttcagtcttcggatggtgtatgtgtccacgaatttatccatttcttctagattttctagtttatgtacatagaggtgtttatagtattctctgacgtttgtttgtatttctgtggggttaggggtgatatcttccttatcatttctgattgtgtctatttgagtctcctctcttctttattagtctagctggtggtctgttttaattttttcaagaaatcagcttctagatttgttgatctttttaatgttttttcatgtctcagtctccttcaacttagctctgattttggttatttctcatcttctgctatgtatgtcactgcatgtgagatgggtctcttgaagacagcataccaatgggtcttgattctttatccagcttgccattctgtgccttttaattggggcatttagctcatttgcattcaaggttagtattgatatgtagggatttgattctctcatgatgatgttagctggttattttgcagttttttgtgtggttgctttatagtatcactggtctgtgtactttagtctgtttttgtagtggctgttaatgctctttgctttccatatgtggtgcttccttcagagcttagtttggccagataatgaaattctgggttgaaatttcttttctttaagaatgttgaatatgccttcaatctgttctggcttgtagggtttctgccaagaggtctaccattagtctgatattccctttataggtgacctgatctttctctctggctgccgttaacatttttttccttagtttcaaccttggagaatttgatgattatgtgtcctgggaatgatcttgtgaagtatcttactggggttctctgcatttcctgaatttgaattttggcctctctagctaggttgggaaagttcttatggatgatatcctgaaatatgttttccagattggttccattctccccatctctttcagggacaccaatgagttgtagatgtggcatctttacataatcccatatatcttgggggttttattcattccttttcattctttttttctctattcttgcctgtcttatttcagagagccagtcttcaagctctgagattctttcctctgcttggtctattttgctattaatacttgtgattgcattataaaattcttgtagcatgtttttcagctctatcaggttggtcatattcctttctatactgtctattttgtctgtcagtgactgtcttatttcagaaagccagtcttcaggctctgagatttctttcccctgcttggtctgttttgctattattacttgtgatttcattatgaaattcttgtagtgtgcttttcagctctatcaggttgcttacattcttctctatactgccgattttgtctgtcagttcctgcattgttttatcatgattcttagcttccttggactgggtttcagtatactcctgtagctcagtgttctttgttcctatccatgctctgaattacatttctgtcatttcagccatcttagcccagttctgaacccttactggagaagtgatatggttgtttggaggaaggaagatactctggctttttgagttcttggagttcttgcactatttctttctcatctttgtgggcttacattccttcaatctttgaagttgctgacccttggatgaggtttttttttttccttttaccatatttgatgaccttgagagttttattgtagtataaggtggattcagccaactggctttgtttctggaagattttcggtggccattgctcagcccccaactcctagactgtgtgctctaactctgggggggctcgtattgggccccaacttttttctctggctccttgaagttaggaatccactgcattggggggtcagagtgctcccagaccactagtcactacaccacgatgggtggtggcagccaaagcatttcatagtgtggtgacagtgggattcatccttgtttacatgtgccagcagcagtggtagcagcagtgcagtgggggacacacttgtcagctatgccagggtgctggtgggtgccagggtgcctgcctccctgagagcattcaccacagtggaggaggcaacacagctgggaggtgagcggggacccctgctggcgactgtgcacagtggcactggtggtggtgttggcttgggggcagggcgctggcagttgcaggtctgtgtgccttctctgtgtactgcaaacaggagtggttgctccatgcaggggaggatctgttattctctgtgcctagtttcactcctgcggcagtgttggtgcaaggaaggggcactggtggaggcagggctggctggtttggtgcccaccaaggttctgtctgcagtggtggtcagtggggacatgggaaatgaactgcactcccgccacagcagtgtcaaggtggatacatgtacacttgcctgctggtggggcaagaaaagcaaaacctgccggcataggcacatgccagcaaagccatgtggggagttgctatgggcctagggaagctgcagtatggggactgaatgtacaggctggtgcatagccatgggggccactctgctggagctctctgctggtcaggcatagtctgccagcacagaagctatgatgcagtcccccaggccacccaaggctgccctgtaagcatgtgtggccaggctggggccctgggagaggccagcaggccaaggggtggtcagatgagaccggccccatatgatggacaagactaccctgcagagttcgggtccaacagttgccttagagctaaagtctcctatgggtgccagttaagcctaaggggatggctatccctggccatgccccaccacagatactctcacaccaaaccctctgggctccatatcagctggcttgctgcccctatcacttctctaagtggctcaccctgtcaacttgagtgttcatggtgggcgagaggttccagaggcccgtggcaagagtgggttgctccttgctagttcagctcacttgtttttccagagctgtttgggccaggaatgagtccaggtgcgtagtcgcctcatgtatggttcccagcttcctcccccttcagcccagcttctgtgtcttccctccatccactcttcagtgaccccctctgaagatctgttaggagcacaccagttgtctcagtccctcattggcagcttttcctcctggctgtgtctagtcagccatcttgccctccccctggtttttttctcccccgttctttgtcttcaatttttaaaaaccttggtcaaagaactctttaggctaagtttgagaactccgtagtcagcttccatgctgttagcagatcttatgaaatcatttaaagtttttataattctgcaggtgggtcttgtctaacatgtgatagagggccaaaaggccacactactgaaagcttaaggaggggtgtgtgtgtgtgcgcgtgtgtgtgtgtgtgtgtgtgtgtgtggtgttttgagggttgccttttctcttggttgtggtatgttaggagtaatggctgttacatactgatgtgcttgatgtgctttgtctttacgggttatagcagtgtagacatgagtctccttttgggataatctgtttcccttttttcttctgtctttgctaaaagctattgctcatttctgctgagcattgcagttaccccttctacctaccatactttctaattttggatcttctggtggattgtgggctaggaaatacgaatagttacgactcttcaacttgttttaatcaaacagatgagtcctcatgatctttatcaaagcaaagtaggtgggcttagggtcagcctcttttcttttcttttttaaaatgttcttttcttgctaataaaagcagtagccattggagaaaatttagaaaagacaaactatgaagcaaaacataatcataataccttgaatcagagttaatctgtattaacatttggtgtatttcctttaagctatgtaagtagacttcagtaaaaatccttcacaaaattgggattttagtatagtatactttttatatccatatgtcttttaaatggtaagcatttttcatgttaactattttaatacagcttaatgtttgcatattttattatgtacattcattcattatattcattcacagtttatttataaacatacagattttttccaatttgtccagtttttataaaagaacaaatccccattgacttttttttttttttttttttgagactgagtctcactctgttgcccaggctggagtgcagtggtgccatctcagctcagtgcaacctccacctcctgggttcaagcgattcttgtgccacagcctcctgagtggctgggattacaggcacctgccaccaggtctaactaatttttgtatttttggtagagatgaggttttgtcgtgttggccaggctggtctcaaactcctgaactcaagtgatccgcctgccttggcctcccaaagtgctgtgactacaggtgtgagccaccgcacccggccccaacaaattcttaacatctacatttattttcttcttttccttttttgtagagaaagggtctcaccatgttgcccaggctggtcttaaactcctgggctcaagccatcctcctgcctctgcctcctaaagtgctgagattacaggtgtgagccactctacctggctctacatttattttttttacatggatttctaaaagtagtgtttaccaagtcaaggttaagaaatttttttttttttttttttttttttagacggggtcttgctctgtcgcccaggctggagtgcagtggcacgatctgggctcactgcaagctccgtcctctgggttcacaccattctcctgccttggcctcccgagtagctgggactacaggcacccgccaccacacctggctaattttttgtatttttagtagagatggggtttcaccgtgtgagccaggatggtcttgagctcctgacctcgtgatccgcctgcctcagcctcccaaagtgctgggattacaggcatgagccaccgcgcccaacaaggttaagaatatttataagtgttttaatatcgactcccacattgctttctggaaaagtcatgtgctttgtatttcagcactttatgggtctttgattccagataacttacccgcacaagtttcgttttataagatctttgctaatttgatagatataaaatgccattggatgttttcctctgattgctagtgaaattaagccttttttcatgtttattggacatttatatttttgtgggaatcattcttgtccttgagttatttttctgttgagagcttaatactttttacaaatttgtaagtcttttgtgtactaaaagttaaaagccctttgatttttttgtaaatatttttctcaatttatttaccttttaattttgttaattggattttttaaaaatagaagttttacatggttaaatttatcattttaaaattactttttcattagttttaagctcagaaaatttcctttcatccagaaattcagttacatcattcacttacatctttttttaaaactagacttttccattttattggctgtatttacccattcttccagtttgaactttagaatgactttttcaagtttcttacaaaaataaattccactataattttttattggaattgcatttagtcctcattcttataagtagcttatttctagtactttaaaaaaatttactgttgtagattgtgattgtttactcccttgtgttccctgttttccctctccctccctacttaccagtagatgaaattctagctggttattaaaagaaatactgctggatacttgtggaggtgaaggcttggcagaaaataggtgtcactggtatcaaatcattgaaaagtgggttaggataacttccttaccatggttggtggaactcgtttctctggagttgggtgaatggtaaagcaggcacaaacctccttttgttttcctgtctgacgttactattctgtactttattgtagagaaattattcctaaggtcttctagattttttatgaagtattgttggtttccaggactctcaacactttatatttcttattttcatgagttttttttatgaaaagggttgagtaggataatcagacagagagacacagtttcggccgggcgcgatggctcacgcctgtaatcccagcaccttgggaggctgagacaggtggatcacgaggtcaggagttcaagaccagcctggccaagatggggaaaccctgtctctactaaaaatataaaaattcgccaggtgtggtggcatgcgcctgtaatcccagctacttgggagaccgaggcagacaattgtttaaacttgggaggcagaggttgcagtgagccaagattgcaccactgcactccagcctgggcgagagtgagactcccatctcaaaaagaaaaaaagaaaaagagagagagtcttcatctaaacctagaaattctaaaaactagctgtttgttcactattttttggcagtgtaaagaattcttaaataactaggtatttgacttcctaagaagtggggtatcaccatatatatgcatttgagaacttgaatttacaaataaatacagagattattttctatttttatatctcagggatgttatttcaatgctaatagtgaaaaatactaccacctttctgcttttaggttggaatgttgcatcagcaggtagaagaacatgaaaaaatcaagcaagagatgaccatggaatataagcaggagttgaagaaactacatgaagaagtgagattttagttttgttaaatgttgtgtgtgtagttctctctctttcacccttgagaactttgttaatgaaagccagtttctactttgtaaagtgggaaatacatactccatcaaagatacaggagtgggaatccatttctctgttctttaatccaggtaaagaggtttgcctaactgtaggtttgatactacctagaagagatgctaaaatatgtttcttggttgagtacctgaaagaaatagagctgtttttgtgtaatactgtgaaatacttgataccaaaaattacatttaatattttaatttttatcagttactagattataaataatggaggatccaaagatttaagaaacattttgggataaataagacaagtaagaaaattctgtccattagctcaattttattcttcagatttggaaaaaactgcttttattctgatttaattgcaaagtactcttctcctgcatcctgaatatcagtgccctgcaagagcatggcttgagaatcacagacctagaggaaagaaaaagagtttttatttgctgctttattgtggggctgggtggtagggtctttaagtgcagggctattgtaatacaaaacttttgtttaaaattttttttaaaattttttctttgaatatatttctttagtagtgtttgttttacatatttaatttttagtttccttttgtgttttagtttggaaatctaacatgttctcagtagtactggttagcactgctcttgttttcataataccaatttgtctcaccactacttcttacaaattcttaaactttaaatatagaaataactgtttctacagttatgcatactgaagagaagctatgaaaagcttcagaaaaagcaaatgagggaattcagaggaaataccaaaaatcacagggaagatcggtctgaaattgagaggttaactgcaaaaatagaggtatgttcatagtaataatttgttcatagtgattgtcagccttcacgtaggaaaatgcggtttctaatggcactattttctggaaccaattttctactatcttaaggactgccactaagctatttcagaggtgagagggtgatccaccatacatcctatcatcatctagttccctgggttaacggggttactggccatcagtaattctcaacagggcagtaccacccttagggagcatttgcaaatgtacggagacatatttttttggttgtcaaaatgactgagcttaataaaactggcatttaggggacagggaccagggatactaaacatgcctaagagtgttccacacaggaaggattattgtacctcaaatgccagtaactctccaattgggaaacatgaccactagttataggcagtcctctatggacattgttcttgtcttatatatcattgtatctcaagcacctaataaagtgggggcttagtaaatgtggaaagtacatggcacttttcgtacaaagtaatctctgtatcagattattctcaattcccatttagatgtagtaaggcattcacttccttctctgctgactttgtttttattaagactgaataactccatgattattgtatatattgagaacttaaggggagctggtgagctaatagtaccaagagtagatgaaggaagagcacaaggctgtcattctcttcgtctgtccttgccattagttcttcactggacataagaattcccagggtgcttttaggctctcagaaatgctgatccagcagtatggcataggacctagggatctgcattgtatccagctcccctagcttattctgatttgagaaacattgttcaacatctttgtgtgatcacttacaagtttgtactctgggtgacctgtcacccacaaatgccagtatattattattacttaaaattataatttctgtgtttaatattcctttatatctcaatatttttttacatttgaagagcttagaatcagaagactgcagctactgcttcccttccacccttttcggcaataccttttccccccaaaccctatatccttcttgcttctcattgccacttcctgactattctcttttctttctacctcaaaaaccccatctttgattttcatgttaccagcctatactgccagccaatgaacataacaaccaaaatagtcatcgtctgacctctgggttatttccttggctcattgatttcagcacccagctcactgtcaattctctctgacattactcttatcataactttgaggatcttaggatctggagagatgatgcttataatactctgaccttacagtttcttggctttctttcctccatagatagtttgattatctttgtgtctcatctacttacttcccactgccattccttagctcttgtcattaccaatatatgccacccctctagaatctcattttcaagcattcaattatcagactaccaatccctatcttttcagctaactctctctagtcctttgactctcagtaatcattaaccatcccttaaaatgattaaattctgccacctttttactgctccattatctacttggtgttctcacttatcggtccttagccagcttttaaattctgtcattacattttttactttccccttcatctcctgtgctcctctcttgcttcctcatatttgcttggcagaatcacagttctgcttaagtccacctttctgcccactctctacctgtcatgtatcgctgaacgtggctagagaaaaacctaatcatactgtctgttctcactttaaattcatggtcactaacctcaaatgggtcctaatgctacctggaatcatactgtatttcctctcatctcctactttccacaatgagtatttcagacttctgcttttctcctcaaactctcaacacctttccccacatcctcacctttgggttatatcttcctttctgtttatagacttccaactcttgtgtccacccacctatctgcatctgtgcccatgtaccctgccttccttcctggaggaactacgcatgccctcccccttttctacccaaggcattaccttagcagttcaccttctcttttctgcacccttaattttttttctctactggatattttttaccagcatccaaatttccctcctcttaaatatcctctcttgacccgtctcttcctcctctgccccattttatttcttccattttataactaaaaaattacttcagtcatctatacttgtctccagttcctcttgtctcattgttcttgtacccactcaataaggcttttgtcccctcacactgcagaagctgttcacatagaggtcaccagtgacttccacattcccaaagcctgtgggctggtccttatcttcctcatcctacctacagctttgtaggagagctggtctctcccaactccttaaccactttcttgacttggcttgagaaaaaccacatttctctcattttttccttgttcatcactcctcagtctccattattccttaaccacctagggtcatgtcattggacctttcctttttttttttttttcctatctacgctcactcccctattgatcccattgaatttcatagctttaacactgtgtatatgctgacaattcctaaatttatatatctagccaagacctcgcctcttcatgacagaataactttcaactgcctgtttcctatctccactatgatgtctaaaatgtgtcaaacttaacatgtccaagctaaaggtcctgtctttctcttcctcatctccccaacactgattcatgttttagttgataacaactcaatttgctcaacctaaaacctcggagtcatcctagacttctcttttctcagcatgatagccagaatgattctgctgtaatgtaagtcaaattatatcacttcctatacaaaaaccttccagcagcttctcttaaaaatctgttatcctaatggcctacgtggtctcattcccagttatctctcttaccttgtcttctcctactttccctttcattcactttattccagccacaccaatttcctttctcacccttaaacacaccaggatgctcttatttcaaggctattctttccacccagaatattgtaacttcaccctcatctccctaggtgtttacttaaatgtttttcactcagtctggccatcccttttaaaaattagaacccgaactgtgaagacttcatgctctgttttctccaaaacgtgtattaccatctgctataccatacaagaaatgtgtcatctgttgcccccagttgagtaggactagggtttttgtttgttttgttaagtattgtatccctgactcctaaagcagtacctggcatatatagtagaatgattgaatgaatgaatgaatatcagaaatttggttaacaacacttatcttaaggagcctgagacttctggagttgagggtcctggaagacagtgatagaaagattgagtttcctttccctttgatttgccccattttcataaatattgaaatcactttcttgatcatgcaatttgatgttactattgatccatcattaattttgaactgtttggctttgggttacaaatatttgttaaaatttggtacagattttctttgttattcaaacttttgcagttcctctgttgagataatacaaatttggatatcaaaggatattgtgttatctgaatctacttggttccttagttttagatactgggaagtaagatttgggttaccaagggacttatctgaaaatttaatctgttcaattcctgggtctggatatcaagaatttggatagcgagggatatctgtaatcatactttaaaattttagttatcttagcatcagttttctgaaaattcactagaaaattataacaacccttaggtggcagcaaatcagtgaaaaacatctgaatccagtgcttaacatctgcgtgtcatactcctcaccatcagggtgttaaatttagaaagacagatatccagaggcacagtatgtgaggaagttagtattactctccagctctgttagctgagtgagtaatggggctcccgctgtggagaaaggtgcaagcgtacccagggacatggggagaaattaaagttaaagggagtctgggaagtagtgacagtgaggagaagcactcagaaattaagtactctaattgcctcctcaggaattccgtcagaaatcgctggactgggagaagcaacgcttgatttatcagcaacaggtatcttcactggaggcacaaaggaaggctctggctgaacaatcagagataattcaggtaggcctaagactttttaaaataatgagaagcagataggttttgatcaagtttgaactaccttaatgcagtgtcctagtaccatttagcctctttcagcttctctccacgaaccctgctctcttgtttaggaagcctctcctcagcatctagactcagctccttcttcccgcctgccctcacacatgcgtgcattcactctcctgtccaggctcatgtccttgtgcccgcttgctgctttgcctccttgcttgtttctgacttgctcacccactctctgtcattgtcttgcttactcaggctcactctatgcttgcatccatgttcactctcctcatcttggtccctagctttgtcgccctctcttcctcccctctctttcttccctaccacagtcccattcctccctctgtctnnnnnnnnnnnnnnnnnnnngggtatcttggccgagtgtctcagctagggagcttcagttagtctgcctatgcggacagatacggagagagtcacatggcaatggtgtgcacaccaactaaaagtggtgtctttgtggtaacaaaaacacttattttagaacattgatagaaacttttcttgtaatggcttaagcaaaaccaaaaaacagacacctactttaggaatatgtcttgtaagaacatattcagctcattcctttttcagttagaatcaagaacataaaggaaactaaaaaaatttgtgatcatctgttatgtgctagacattgacccagtgcttcttgtatgtgttctctgtttaatattatgataatctgtcaaggttggtagttatcttagttttatagaatgagggaacagcctgggtaagttgaaatagctagaagggagggttttttttttttttttttttggctttttgggtttttaaaaataatctgcatttatttgctattttaagtctcaataatgcattaactttttgttcgtctccctgaaatatcagcagtctgataaactaccgacagtggctgtggctctgctgtgagtgacttcattcaaaatggtaggaaaagtccacaacaattgcaaggaagaaatttattttctaggccacagcaagctgtgcagccagacagaccagtgaaatcctgagatgtctggaccagtttttttgacttgaatgccaaagcaccatagagacctaataagaaattgtgggtgtgtatatatatatatatatatatatatgtatatatatatttttttaacaacaaaaaattttttttggttttcttgagatgaggtcttgctgcattgctcaggctgatcttgaattcctgggctccagcaatccttccaccttggcctcctaaagtgctgggattacaggtgtgagccaccacacttgaccaagatattgttatattctagttgtagccttcagattgacaaaaaagcaaattgagtcttaatttttacagttctcaattatttatccatggagtattattgattatagattctctcttcaaattactgttatcctatttcatattactgttgtgattattgactctatgtaattaaaacttcattattagtaaaaatgggatttttacttactgtaattcagctagggctagggtaagaagcctttcaacagccaacatttgtttttcctactaagggtgtttgaattaattcttctgatagttttgtttaacctaaaactgtctgattgtttaataaaaatgttacatataaatgtatttatccttctcccttagcaaactaaataaaattaaatctttcagtgattcagtatataccagtgctgtatgatcatcatttttttaaacatctaaataaacttatctatatccattaagtagcattaatagttgtcatcatcttgtcaatctttattttaattatggtaaaatacacataaaatgttccaccttaaccatttttaaatgtatagtatagtaatgttaactatatgtacactgttgtgcaacagatctctagaacttttttatcttgtcaaactgaaactctataccattccctacttcttatttttgggtggaatattacagagcaaatcatagatatcatcttatttcccaacaggtaaggacttaaaaaataacaatatatcagtatcacattaatagaataataacttcttaatataatttaatatccagtctgttcacatttctccagttgtccagaaaactatctttttacaattgaatgtttgagtcagaatccagtcaaggttgatgtattgcatttggttgaaaggtgggtcaccattgaacaatgacagtagaaaacctgggaggctgagtaagtggatattaacctaccctccattaaaaaaaaatctctgtataatttttttcttatatgtttttaacatctaaaagtataattcggaaacaacttctccttctttgacatatgtttgcttgaattcatttcttttaatcagctattaaaattacataatacatgcttattttagaaaaatgagaaaatgcggataaaatgagaaataaataaatcacccataattctaccgttaagagatttacgatgaataaaattttggtgtaaatttcttctgactttgtgtatgcttacatacagtgtgcagtacattcatgtacttttgataggaaaaacctatatgcactgtgaatgggaaaggaggggtagttgcaaactttaaaaagtcctgagagtagcaaagtgttgataatttttgaagctgtgtgataggggttcatcatcttactctctctatatttgtgtatgcttgaaattttccatgaaacaataactttaaaatatatagaatgcttactaagtgacaggtactatgctaagcacgtcacagctttaaaatttttcctttttaaatatgacatgtcaacagatttgtagtcataatgattgtgtagaagtcccccctatcgttaaatgtataatgacatttgtaaccagtcccttattgtagaacatttagttttttacttttcacttttgtaaatagtgcttagattaacatccttatataaacatttaggagtatttattttcttaggaaatggccctagaattggatttactgtatcagagtaccttcaaatattttaatatatattgccaaagttttctccaatgatggattgatagactttctctagcagtatgtgagaatatccatttcctcatactttccccacattgagcgctattatttcttttgactttccccacttttaggcttgtctttgccaatcttataggtgaaaaaaaatgataccattgttttaatatacattgttttaatatgagtgaggttgaggacttttttcatctgtttatggccatcttcatttttcataaattatttgtgtcctttattcacctttgttttaggattttttttttttttttttaaatcttaatttattttcttttttgagatggagcctcggttgcccagcctggagtacagtggcctgatctcggctgactgcaacctctgcctcccttcaagcagttctcctgcctcagcctcctgagtagctgggattacaggtgctcaccaccacgctcagctaatttttgtattttcagtagagacagggtttcaccatgttggccatgttggtcttgaactccagacctcaagtgatctgcccaccttggcctcccaaagtgctaggattacaggcgtgaaccatcgcacctggccggatgtttatattttactattctgaaagagttttccatacacttaagtatgaaatataagccctttgctattatgttacagttgcgtatgtgtactcaatttaccttaatttttgcccagtattttttatggaagtacaattgttttataaacagttaattagaattgcttaattctatcaattttttgttcagcgtttctatctttgatatcatactataaagtcttacctaagtcaaatttcttctaatgctttatcatttctttttaatacattttatctaaaaattactttagtgtaaggtatttgataggaatctaaatttgttttttaaatggttatataatttactgactattacattttcaggattggacaaaatgactctaaaattcatatggaatgataaatgaacgatactagccaacttttttttttttttttttttttgagacggattttcgctcttgttgcccaggctggagtgcagtggcacaatctcggctcgctgcaacctccgcctcccagatcaaacgatcctcctcctcagcatcccaagtagctaggattacaggcgtgcaccaccatgcccaactgattttgtgtttttagtagagatggggttttactatcctggtcaggcttttctcgaactcctgacctcaagtgatcacccgcctcagcctcccagagtgctgggattacaggtgtgagccactgcgcctggccaccagcattttttaaaaaggagtaatggggggatgtttgttctatcaaatattaaaatgtattttattaaaaagtacagttgttaaactgtaatgctagatgtaacaacagagtcgtggttatatagtataggaaaaggatcagtacagtctaaaactaaggtcatttctgtttagaaggctactttttctgttgcctacataatgcaaaggaaatgttcaaggaaatcttagagaacagtaagaacatttgaaaaaaattaaaatattaagccaacataaaatgtaaaatatttaactgataaacagtatgtgaaaaaagtagaggttgctctatgttttccttttgaaatacttagatgagctgtaaaatattcttcaagttaattttaaatccactgttaattatatgtatataaatatatttatacgtatatatgttgtatttttaaaagcatccttttcctgttacaacttttgaagaaaaaaatgaccctaactcaaatgttgatctgttgtcttggtagaattatcagagttaattgaattggcttagacctactgtttaaaagttcgtagtagcatagacacaacagtgataagagaatcttactaggagctgtgttgttaataggctctttaggctgctctctagtggaaatgctgtgaggctgtggcctgcactggcgcatttggagttgacagtgatggggagcttggtaagggattgatgcttacaatggccgtaccttcatactgggattctttggaaaataaaaagccctgttgcttcatatcacattgttcatagtaatctcactctctgggagagtcattttcttgaagcaccaggaagtagctatcacaaatccagaagaggatttgaattcaacccccactccccaatttcttctccactctctttcacactttagctggccacactggccttttgtttcagtttcagtctccctgatgtaaactgccttcttgattgcttttttacttttaaccacctctgctgtgatttgtattgttgaaataacttctacccactccaatagaatgctaaatgttagattaataagaggaatgcctgtttctggctcaaagaattagtggttagtgcaaaaaaaaaaaaaagtttaaaaatatgccagccttaaaatacctctaaagccagataattatcagaaataatcattattttagaagtttttaaataattatttctgactttcttagtattgatgaagtgttcttgagattagtgtagtgctaatagatattggtgagtcacatgtaatttaaaattttctactagtcacattaaaaagtaaaaaggtgaaattaattttaataatatattcaactcaatatgtcagaaatattacaacatttactttacatttttttaatgagtctttgaaatcttcaactgaatttgtattttacggttaagagcacatctcaattcagattagccacagttcagttgtgcaatatccgcgtgtgggtgactgcaatggtattgcagccctagtgcattctaggcaatgaaaatttagaatttgtacttgagttgattaatgtacttttcactatgcttaaaaaacactgtatttttgtgtgaccaaaatagtaaatcagtgaaagaaggttatgttctccattcttcaaaactgagaagtttattagtatttagcaaatctagactcactggttaaagtatgccttggtttaactattagtttattatatcaatactgagtttaagatcacagatttgagttgatagtgttaggtagctattacagtattaaaaagatagtgttttgcaattatgtattatctgagtgcccattttggcagtgggtttctagttgtgttttgctgagacccagggctgctgtacagattaagggtaggactaagggacatttcagcaagctgggctctaacccttttctccttctcaccctcacccaatatctgcatttatttattctgcacaggaaacctttcctctttgaaaaaaaagtttatattatatttaaaagtttggagacagttccatgcttagcagttgttctagtgaatctaaacctaaatgttgatgttcttcctttataccattgtagggatctggttaaaaaaaaaaaaaggctctttgcactgaaatcttgatcggtaatttatacaaacagtatttgtctatctcttcacctctctcctaccctctctctggcttatgggaagtttttagcatctactttatttgactacagtatatagtacaggatttggacctgtactgtaaataataaaatctttaaatctgcaatagatagatttcccagagatatttctacttgtatttctaaagtaaaattgtgtgattttacctttagaaatatttcgagtaagggaagtttacctctacagattatttatattcatcttcaatgtgtagatgaagtaccagccaggatgctggattaaaacttgtaaaaactaaaaagtttggagctaaaacccaatactgctgggatgcatagcctaaaacatagtagtcagtaaacgtatcattcagagaaaccagtttgagatgcattatatttgtttacctcttttaactcaggaagtgtccaaaaactgatgacagaaccaatctctcctcccttataagcaccttttcctccaataaacaaaagaccacaatttccccatttctctgaatttaaagagcattttatggtcacgatgactaatctaaatatgaatgtttataatgttaaaacagaataattacaacatgctctaggtgggggggggaatttaaactacaaatttagtgattttgaaattctaatttctaaacttccatcagaaatataataatgcattatagttcctatttcctatgttttaaataggaaataattccagccaggttgcggttgaatttctgtgtgagtaggtagaatactgtagcatctcttctcctgaggaatccctttactttatccattcttttctatttatttatttatttgagacaggttcttactttgtcacgcaggccggagtgcagtggtgcgatcttggctcactgcaacttccgcttcctgggttcatgtgatcctcccatgccactgtgctcgggtaatttttgtattttatttgtttgtttgtttgttttgagacagagtctcattctgtcactaggctgcagtgcagtggcgcaatctcggctcactgcaacctccgactccctggttcaagtgattctcctgcctcagcctcccgatcccgagtagctgggattacaggcacgcgccaccacgcccagctaatttttgtatttttagtagagacgggtttcaccatgttggcaaggatggtctcaatctcctgacctcatgatccgcccacctcagcctctcaaagtgcgggattacaggcgtgatccactgcacccggccaatttttgtattttttataaagacagggtttcgccatgtttccaggctgatctcgaactcctgagctcaagcgatctgcccgcctcagcctcccatagtgttaggattacaggcgtgagccaccactcccagcctctcaattctttcttaccccttcgcaatatatatatatattttagtgagccaatgctttatgtttttatggaaataatagtttcattttagtcttattcattgattattttatcatttcccttttacctattgattgatagtctgtgtttctaggctcagcttgtcaatcggaaacagaaattagagtctgtggaactttctagccaatcagaaattcaacacttaagcagtaaactggagcgggctaatgacactatctgtgccaatgagttggaaatagagcgcctcaccatgagggtcaatgacttggttggaaccagtatgactgtcctacaggagcagcagcaaaaagaagaaaaattgagggaatctgaaaaactattagaggtatgttttaaaatcactataattgggggaagtgtgtgtatgagtattttaagagagtgttattaagctagaactaggttctacaatccatactttcttccctactttataaatgatggatcagatattgatagttttactaatattgtgactttattacaatatttacaatattgtaatattgttacgtaacttatagtctgacttcctggcttctcgtgaaatagaaaaattgtaataatagctggcttagaaatttctgagtattttgcaggttctgcaggaattaaaaagaaggaaaattataatcatatttgacttttttgcaggctctgcaggaagaaaagagagaattgaaggcagctcttcagtctcaagaaaatctcatacatgaggccagaatacaaaaggagaagttacaagaaaaagtaaaggcaactaacactcaacatgctgtagaagctataaggtaaatttaatcttaaatattattcatcttagccacttaatgactaggtattaagcactaggcttatttttatttttatttttattttattttcagatagtctcctgttgcccagactggagtgcagtggtgcaatctcagctcactgcaacctcaacctccgaggttcaagccattctccaggctcagcctcccaagtagctgggactacaggtgcatgctaccacacctggctagttttttgtatttttagagacgggcattcatcatgttggctaggccggtcttaaattcctaacctcaggtgatctgcccacctcagcctcccaaagtgctgggattacaggtgtgagctgccacgcccatccaagcactagttttcatattgcatattcataattttatgtttgatcatattgtggattttcttaattggctttaacttctgagttaggtttttaaagtgttataaaattttgtgtggttaattttcttctgccaccagttagggtccctaacagagactctcatgtttagaaagttagaaaccaaggtcagtttgcatgcttggtgaaaatccaaatgtgcagggaattgtcatccatgtctcctggaggcctcactttgttggtggaataagttgtgattagtagctgcttatcattaatagcagccagccattgggctagccctcttgcttgatttaagtctggtgcacacttttatttttgccagaattctcctgtaacttttcagtttttttggtacagggtttcaagtgtcactgaagtgattttgccattttgtctttttcccttgaaaaaaggccaaatcccagttaagaagggagtaaattgctactttttgaagtatcagcatctcttgactctttctttcctctcccaatattctttttataaagcaggagacaaacttgaagagttccaaagaggttaccaaaaatgatggggaaacacagactagatgagcattgtttttgtttgcagagataaaggccttaacaatcatcctatgtctttccataggccacgggaagaatctctggcagaaaagaagtacacctctcaagggcagggggacttagacagtgtgctctcccagttgaattttacccatactagtgaggaccttctgcaggcagaggtgacttgtcttgaaggcaggtacatgattatacacacatttcaaaaatttcaagttgttaaaatgaatttttgatcatcatattgtaaatgaatgtaatagtcatagtaaaaaaaataagatttttttctagtatccacaaatggcctaagttcttatttcttttttttttttgagacggagtccgctctgtcacccagactggagtgcaatggcacaatctcagctcactgcaacctccgcctcccggttcaattgattcttctgccccagcctcctgagtagctgagattacaggcgtgcaccaccatgcctggctaatttttatatttttgtagagacggtgtttcaccatgttggccaggctggtcttgaactcctgacctcaggtgatccacctgccttggcctcccaaagtgctgggattacaggcatgagtcaccgcaccctgccctaagttcttatttcattgagaagacagaagcaattaaaggagaacctcttaatctttctgtcatcaaatctaccagtctgcccatacctgtgcctttctgcacttctaagaccaaccactccacttgtgtcctttttctgtagttatatcctttctcttctgcatcatcaagttctttctgtctgctgaatctatccactggtataaaatacgctgtaacatcacccatctgggggaaaaaccatcccttaatcctatgtctccgtcaagttatttccacatttctgtacttctctttaagaccaaattcttcaaaagagttgtctatactgactctacttctttacctttcacctgtttagcagcccttcacttaggttttcctccttgccacctcagaagcagggtaggaaggggtaacagttgacacatggtgatcctttttgttctgctgtggtgttgttacttccttgggtgttaattgaatcctgactaatgctataccatacccacctaaacacttgtcattgtcgtacttatagaattttttttggtttttcataacctctcaactttttgattgggaagagtgtgatatcttgttttaaacacatgaatcatgatcatttgtacactgacattttctgtatgtaaaagataaaattgcttttaacatgaactgttaacctttaggcaaacaacaagagaaatatcattttacactttttaggttatctttaagtttttacatttgtttctggttttggaaaccagtaagtattttcttacttttatctacatgttaaatacacaaacatgcatacacacacatattttctgctttattccttttggaatacttggagtacttgagatagtctttgttattattgaagtatatgtgtactcttccgtttgactaaaattaagtttattatttttgacgttgggacaacagtttacatttttatcacagtttttttattgattggctttttagtaatattttaaatgactgaggtgatgtttaagatattggctggatattttttggatatcaagaatgtaaattagatagtccaatttataggtttcaggattttggttttaagtatgggatcttatttttgtcatacagtttggaatctgtgagtgcaacgtgtaaacagctgagccaagaactaatggaaaaatatgaagaactgaagaggatggaagcacataacaatgaatacaaagcagagattaagaaggtaaaaatctgcatacctaggattgcaaaattgtatgtgtttatggacaaagctgtggattgggagattataggggttatttttaatgagaaaaaaatgtagttcaagggaccacttgatatttaggagtggaagagtttgtggaatgtgcatagggaaagtgccttctttctttggcatcgcccctgatgcccaataaatatttttaagataattgaaggctgtcccctttgaactcaaaaactttattttaaacatgttttgatgaaaagttttctaaaagacatacactctgttgcttgcaaaaaaatatgaactgtcacttaatattttcttattgcctaaagatagtatttatgtattgtctcctgtgctatgatgtagttagtatccttgtcagctattgaggtatgcagagctgtttgtgtctatatgaatgggccctaactgtcctatttgtttgatttgtattttttgttacttctttaagattacttctagttccttacttcctcttgttctatttgttatcctgtggactaagataccatatgagcaaaacttttagattcacaactaaaaaaaagaatgaaggtcacaagtactctcctctaaattgtgtgcatggaccttgattctggtcctcagcacttgaataacccatctctccctgttttgaggtataataaatgattgtaggtataaccacctgaccttccgtacagatatgcaacttggtaaattgctaatttttctgcagatttaatttaagagaaatttaatgtcttgagataaggtgaacttttattttattagctagtaacatattattctatctaaatgctttctcttaacttttggtgctttcttttctgcttctttatagttgaaagaacagattttacagggtgaacaaagttacagttctgcactagaaggaatgaagatggaaatctcccatctaactcaggagttacatcagcgagatatcactattgcttccaccaaaggttcttcctcagacatggaaaagcgactcagagcagagatgcaaaaggcagaagacaaagcagtagagcataaggtgaagcctgaacaaaaccttttttaaatttgaaatttgttttaaagatggagttgattaaagacataattttcataatatttaattcagtgaatttttattagatacctgctttgagctgagagtatgctggctagcaaagagtttagtgagcatggtggggaggtgagagtagacacagacaagtaaagtgactgtatcagtggtgtatggtgagagtcactagagatcacaagcagcctgaatctagaccactcgctgcaaaggccttccagaaggtgtgatagcaaagctaagttaggagcaagctgggtgatggggaggaaaagtgtttcaggcacaggaaaatacagaggtctctaagagagagtagaaacacgcttgctgtggttgaaactagagtacaagtgggatgagtggaaggtatgagactggaaagcagggactggctgctgaagggctacgttagccacgtaaaggagttatactgtgaccttgaggtcagtagggaatggctgcaagcaggagtaaaattcagtggtccttaaatggagaataagcagggagacagagcacccagatgctgttacagtggtaagatggtggcctgagcagtgggcaagggaggcagagggaaatggatgaattctggagatactgggctggtaaaaatgactgggcattgtatttgattggcagggaaggtgaggtaggcagagttaaggaatggtgctccacaggatttaaacttaggcaactgatggaaagtgatgctttttaatgaaatagagaaaagacagggagcaagtttggtgaggaatgataaattgtgtgaaaagtacacagactggggaaactggtggagaggacattggtttgacacatttgtttggaataaaggctgggaattttgtatgggtaatagtcaattccacagaaggcctggagttgaagattaaaatcaggattaggcatttagctgtggctgtcctttcttcatggtgacatttgaaaccccctgagagacttaatgattatagtgagaaagcatagcgtaagaagagaagtgactcaaaccaaacttaggatacttctcatttagtgtaaaaaagatgttggaatgaagcttaaaaaaaggagcagtgaggagggaaatcagatagtttttgccaagccaaggaaagaaggaatattttcaaatgggaatggtcaagcacaaaagctgaggggaatgagaactgaatgtaagttgttattttgtgaataaagtacaattccatgtgacgttgcaggtagaagccaaattggaggaggccagcacaggagaatgggtagggatttaaggggttcagtggattgaaacttcgctgctttgtcacctgatttatcctattagaatgatatcttcatcccattcatgttcattcaccttaataacatcttaaaaatctttttagaaagtccatatatatatatatatatatatatacacacacacacgtacatatatatatgtatatatatatataaatatgtatatgtatatatatataaatgaagaatatgacttagcctaatgaaaattccatgtggaaaaattttgtaagatgcatgtgatttacatgttatatttatttttttctgttttccccttttcaggagattttggatcagctggagtcactcaaattagaaaatcgtcatctttctgaaatggtgatgaaattggaattgggtttacatgaggtacataaatagaaacttaagtttttctactatccaagccttcaaaaaaattactttgtaaatatttacattataaagagagaattaagatcaacttagatccttttgcagaaattttctcaaagaaaatgaaggtaaaacaatactggaagtgagcaaaatatgactctccactccagcagcaggaagggtttttgtttgtttttttgagacggggtttcactcttgttacccaggctggagtgcaatggcgtgatcttggctcaccgcagcctccacctcgcgggttcaaatgatgctcctgcctcagcctcctgagtaactgggatcacaggcatgcgccaccacacctggctgatgttgtattttcagtagaggcagggtttctccatgttggtcaggctggtctcgaactcccaatctcaggtgatctgcccgcctcagcctcccaaagtgctgggattacaggcatgagccaccgtgctcggccaggaaggtatttttttatattatgtatgtgataaaatttacctacagtctgtgttcttagttggaagaatgtatatgaaggacttagcatatagtacatagtacctgacacttagtaagtatgcaatacatcctagatggtggtattattattattattattattgttaatgattattatgtttgttatctttttagaaagtatattgtctttaaaataatttaattttaattttatttctacaagatattcacataataaaatattttagaatcttttatatccaaggacttttagtaggtgctataatgaacacaggctgaataagatagcattcttgcctttaagagagattttggatcagctgcaattactcaaattactctagcctttaagagactagagtaatctagtagcaaggataagaaatgcatacaagcttctgtgaaaccagagagaacatgattagccaacagtgaattacagtatagatgctcttttaactgttttgttacaaaattcctataatttgcaaaatgactcatctattctgacccatcttttcttggtgtaggtcagatgtctgaaaattgtataaatgcttttttcctgcatttccagagagtattcctccaaaaagatatatggttccaacatgctccctgtttgctctgaaaaattctaatttcacaatccaggattgtggatactggggtggaagaacatgcaaaagactattatagagtaccttatttcaactggaaaaatgggggactatttttgtaatctttcagaagggtaagattctccaaacatcatgacgccatagaggattttacaacataaaaatgtgaagtttctggatggtaaaaggccctattaaaaaagactaatagggagaaaacagtttataatcagacaaaaggttaatgtaaattattaatatataaaaattccctacaaagataataaggaaaagataatctagtagaaaaataggcaaagaatgtagatagatacctcacagaattaatataaatatctagtaaacaaagaaaactgttcaacctctctaataaagcaaaatagacattcttttactaattggtttgataataacctttaaaaactaatatatagccagtgttagaaagatgtaaggaaacagacttattgcactgtcaatgagaaagtgaattgatacggcctttctagaggacagcttagcaatatccatcaaatgcgtaaatacgtatagcctctaaattcctgggtcatgtgtgtttctgattttgatagtccttgctgaattgttttcagaatggtcttatctttttacattcccatggaaaccattctctaggagcaagtgtgcataaaatggtcattgaagtattgttcgcaatatccaaaattttgaaataaactaaatatttattttaatggttaatttttgattttatgaatattacactgtcattgaaggtggcagatgaaaacactcatctgatcttgctctatcctcaaatccctctaaaactatcatgaaaggatttatttttgttctattttatttttatttttttccttttattattatactttaagttttagggtacatgtgcacattgtgcaggttagttacctatgtatacatgtgccatgctggtgcgctgcacccactaactcgttatctagcattaggtatatctcccaatgctatccctccccccttcccccaccccacaacagtccccagagtgtgatgttccccttcctgtgtccatgtgatctcattgttcaattcccacctatgagtgagaatatgcagtgtttggttttttgttcttgtgatagtttactgagaatgatgatttccaatttcatccatgtccctacaaaggacatgaactcatcattttttatggctgcatagtattccatggtgtatatgtgccacattttcttaatccagtctatcattgttggacatttgggttgcttccaagtctttgctattgtgaatagtgccgcaataaacatacgtgtgcatgtgtctttatagcagcatgatttatagtcctttgggtatatacccagtaatgggatggctgggtcaaatggtatttctagttctagatccctgaggaatcgccacactgacttccacaatggttgaactactttatagtcccaccaacagtgtaaaagtgttcctatttctccacatcctctccagcacctgttgtttcctgactttttaatgactgccattctaactggtgtgagatggtatctcattgtggttttgatttgcacttctctgatggccagtgatgatgagcattttttcatgtgttttttggctgcataaatgtcttcttttgagaagtgtctgttcatgtcctttgcccactttttgatggggttgtttgtttttttcttgtaaatttgtttgagttcattgtagattctggatattagccctttgtcagatgagtaggttgccaaagacaaaaaccacatgattatctcaatagatgcagaaaaggcctttgacaaaattcaacaacccttcatgctaaaaactctcaataaattaggtattgatgggacgtatttcaaaataataagagctatctatgacaaacccacagccaatatcatactgaatgggcaaaaactggaagcattaccctttgaaaactggcacaagacagggatgnnnnnnnnnnnnnnnnnnnnnnnnnnnnnnnnnnnnnnnnnnnnnnnnnnnnnnnnnnnnnnnnnnnnnnnnnnnnnnnnnnnnnnnnnnnnnnnnnnnnnnnnnnnnnnnnnnnnnnnnnnnnnnnnnnnnnnnnnnnnnnnnnnnnnnnnnnnnnnnnnnnnnnnnnnnnnnnnnnnnnnnnnnnnnnnnnnnnnnnnnnnnnnnnnnnnnnnnnnnnnnnnnnnnnnnnnnnnnnnnnnnnnnnnnnnnnnnnnaaatcatgagtgaactcccattcacaattgcttcaaagagaataaaatacctaggaatccaacttataagggatgtgaaggacctcttcaaggagaactacaaaccactgctcaaggaaataaaacaggatacaaacaaatggaagaacatcccatgctcatgggtaggaagaatcaatatcgtgaaaatggctatactgcccaaggtaatttacagattcaatgccatccccatcaagctaccaatgcctttcttcacagaattggaaaaaactactttaaagttcatatggaaccaaaaaagagcccgcatcgccaagtcaatcctaagcaaaaagaacaaagctggaggcatcactctacttgacttcaaactatactacaaggctacagtaaccaaaacagcatggtactggtaccaaaaaagagatatagatcaatggaacagaacagagccctcagaaataatgccgcatatctacaactatctgatctttgacaaacctgagaaaaacaagcaatggggaaaggattccctatttaataaatggtgctgggaaaactggctagccatatgtagaaagctgaaactggatcccttccttacaccttatacaaaaatcaattcaagatggattaaagacttaaacgttagacctaaaaccataaaaaccctagaagaaaacctaggcaataccattcaggacataggcatgggcaaggacttcatgtctaaaacaccaaaagcaatggcaacaaaagccaaaattgacaaatgggatctcattaaactaaagagcttctgtacagcaaaagaaactaccatcagagtgaacaggcaacctacaaaatgggagaaaattttcgaaaggatttatttttaaagcgcaaacccacgaggttgggaataataggagaggagacaatagctaaacattttgtaagggggaaagtgggaaggagggaaggaaggaaggaagggagggagggaacttgatatcccctaataaagtcaatactaagctagtagtggagaactctaagaactaaactgatttacaccacagaattctgtaaaggcttaggattcagcagtacttggttgagagactcttatcttatgcagtgattatctgttcatatttaagaattgagaactctcaggggaacttaagccagaccatgaccagagatgctgttcagcttaatttctcctgaaacttccagctatcaataatagtggtaatactgttctttctttagacagctagatgtgtgctcgctactcagttttcatattacctttcatattcatttatctgtagtaattgtttataaaataataacttagagaaatttttaaaacatacctgaatgaaggtaagcattatcattttttaataagtatgtttaatgacatcagacatcaaactggtgaaaaccttgtcagcagtttaagctttctctagttttgaaattacatacagtgtgaatatgttgtacatattatgaagaataattattagaaaatgcccttttgtattttaccatgtaggaagctgaagttacttgtacaaatgaatgtttgggttaaatgtctattttaataaattacctaattatcttaataatgaaagcaacagctctgataaattactgaccatgttttaaaaaccgataatagtttcattttaactcgtatgtcctgcagatgttcttctctgatattttatctggcattgacaacttgttgaaagattttgtagctcatagtcactacttgtacacagatagttcacaggtatattttaaagtttatgtttttgttaggaaaattatgtttgtcagaccacttcttgaccagcttactttcataatttgttttttttttttttnnnnnnnnnnnnnnnnnnnnnnnnnnnnnnnnnnnnnnnnnnnnnnnnnnnnnnnnnnnnnnnnnnnnnnnnnnnnnntgtttaagattagagattatttatttaaaagttgtccctgccagccagtaagatttttctcacaactttttgttcaaatttctttccttgaactaggtctccgttttctttcattagtattctggggctattcaaccttcaccttcttgcagaagaaacatggctgctattttccttcttcttccctgtttctgattccctcttacagctttcctccatcctgattccatccttcctccaccttcttggaattccttgccacacaaggaagcccgttgtgcttctagtgttccactaccatttacttgaagaattctttatctctgttagtcttaggaggcctaaaaacaaagcttcattaaagccatagattaactacttacaactaaaaaacactgaattttccaaccagcagtatcacagatcacaggtattcttgtacagattaagtgactctagtattcttttttattaggcaaaagagatttcactagcagacctccaggagaattatattgaggcattaaataaattagtgtctgaaaatcaacaactacagaaagatttgatgaataccaaatctcagctggagatttctactcagatgtgcaaaaaacaaaatgacaggatctttaaaccaacacacagcagaacaactgagttcaagaatacagagttcaagtaaaatttttttaaaagtttatttaaaatgtgtattggtacaatataattctcatttctttgagaataatttttgacttacagaaattaaatcttcatcaaaggactctatgtttaattctgaagtatagtgtgcacaagtaaagctatgatcatgttaaaaaatggctgggggaggtgtatagcattttcattaaagctttagttttgtacactctggatatcagtgtaaacaagatgtgtattacctgaggcttttcatgctgccttccacctcttcaaccccatttgcccataagaagtagaatttggctttttataaacagcttcctttgtctttttagtcaatttgttataggctgttaccgtaagaaataagcattcggtgaaaagccacttggcttcagctcatactatatggcttacatgttttcctacccaaagcctttgctgacaccctcacctccactcctacacccacccaatcccctagttaggttaggtgccttcttatgtgcacagcacttctcctgtcccagcactaaccacactagattactctggcagcttgtttgtctttcttgctataccataagtgtgtgagggcagggacttggtagttggaattggatatttggggcctgaatgaatgaaagaaatctctttctgatctgagtaggttgctcattttgtaaattgtagccttattagttaggctattaagcaaatttcctacatttctgttggaaagagaaaagttgctacaattttttatttgttttgttttctaatctaccatccaggccaacccatggccagcacagacatgatggaataaagactgagcactacaaaacagatcttcattctccaagaggacaagcgtcggatagtataaaccccatgtctagggtgctaagccccctgagtcctcaaatcagcccttgcagctccaccaggtctttgacttcctactctctatgtaaaactcattctttgccttcagcgctagatacaaatgaagccaatttttctgacactatgtctgagagtatgaatgaccaagaagagtttatatcttcggtatggaaactttctgatcttagtaatttgttagttttttaagtttgctttgattttttattttaagggtgaagaaggtgatttttttttccttactgattcttttatcataagtactcttcattattcttaggtatccctgtcatacagtttttgcttgtgaagacactttcggccaagactacttttcaaaatgttctgaaatatgttatacgtattcatttgtctttaacccttattggaaattcccttcttgcccttttcagtgatgctcaattttcttctggaatggttagttcaagaactgtctctggatgccaagatagtcctgaggcacaggcagtgaaggaggaaaagaggaactgctggaaaggagaaagggagtgtggagggggaggaaggctgtgcctctgatgtgtgcagagcatggcttgggggtcacagatggtggccctcagggcagaatgtgccttggacaccatgccggtcccttgctccttccattgctgggcaggctgcaccatctttttgccttctgcaccaaagcacttgccatgggcccttcatttcctgtcaccagctgtggccatatagatgtgaaagtgcagtatttctgacttattaatgtgctaccaagtccatggaaaggttttcttttatttttcaaaataagtcctcacttcactttcttcctaagtttagcagcaaaatttttttggcaccagaactttccctggcctgaactgatgtgttagtatgtatagactttctctattccacttagtgtgagtatccatgtgttttgcttcagaaatatcagtgtgtttggtgatgggatgttccctcagactccactggggtaatacagttgatcctcattattcacagattttgtatttgtgaatttgtctactccctaaactttgtctgtaactcccaaatcagtatgcgcagcacttccacagtaattcgtggacatatgcagnnnnnnnnnnnnnnnnnnnnccgacttgcacaatcccagccaaggtcgaagtaggcagcactctgccttgttgcccctgcttatgcggaggtgaccatagggtggagatggacgggacagcgcagtgtagggaaagaagctcagctccatgccagctggatagagtctgaatcccagcttcagcaccagttagtggggcagcctcaggagagttaccacttctgaacctcatgtctctcatgtgaaataaaaaatacagaatctaccagaatgatttgttctaggatttaggattatgctctctgtgtggggtatgtgtgtatgtgtgtgtgtgtgtatttgttgtatgtgtgtattttccctgggccaaaaattctgtgtttgctaattcagtgttttgggtgactttatagaacacaactactgctattgtgaatgagtattgactgcatatggcatatgttctatgttacctttctaaaatcagaattctgaaatatcactagcctcaagggtttcagataagggactgtggactgaaaatttggaggagaaaaaataattgattttagctggcatctaatttatttttgttaaatttttgtgctttaaaataaaagtgacatacttaggtttttaaagtgagtttgaaataataggcattaactatggaagcatatataagtctaaattgaaacattcttcagaccaataactaatatatgatactttacattgttacaatttgggtcagaaacggagagatctgtgttaatttttgcagaacttactgatttttgttcttttattgctcttgtcattaggatgaaaaccaaaaaagtatcttcagaggaaaaaaatcaccttttaatattgctagttagaaaatgtcatgaacagtgtatcttagaaatataatattctacttatttacacatgtcaaaatttgtgtctcttccagtgttccttgcctgtatctccccttggttcaatagctaccagatttttggaagaggaggaactgaggtctcatcacattctagagcgcttggatgcccatattgaagaactaaaaagagagagtgaaaagacagtgagacaattcacagccttaaagtagcctcttaaaaaaatcacaatcttggaaataaaaataaacaccaaagagttactgtcatctgaagtagcagctctttaaaaacatgaagagataaaattataaaaatgatacatctaaagcagtggtgaagaaagctgaaaaactgatacttttgataggcattttctctgcactggtttgtttaaaggacttcttccagcaataagttgaaagaataaaccactttgctagacttttttctcatacgaatatttattatcataaagtgatacttaccttgctgacttaaatgtgaatagctatgtactaattgaaataaggattttatgatacatgttgaaaataaagtaactgcaggaactttctttaggggaaatgtgtagaagcatggatttaggggtcaaacatacctggatcgatagactggttttgccacttaccagccaacggggcttgttatttactgggctggtagcccctcctagccaaggggctggtagtgtgtaaagtcaggctggtagtgaataagggggggggtgtgctaaagaaccttatcaagcagtcctctcttgctcaacactcatgcagaggagagaggcagggagggcaagggactggctgtcatgcacggtgcccatggaatatccattggaaataaatgttcatcgtctgcactgctgaggacaagtttagatgggagacaaagatctggatgttgatgtgccgcaggcatttgaaacgatgggagttgataagatccaccagggaggctgtggagagagagaggagcaggaggctgggtttggggccctgaaagatgccagcatctgaggatcacaggaaatagatctagcaaaggaactagaatgtgcagttacagatgagaaaggtcagtgtagtgtacttgccagctcaagggtgtggcctctgtgaaccctctttctgtagtggatctttcccatcagcgtaaaacatcctgttatttcccctttttaaataaaacctcagttttttttaatgcctctcttttactgctctgtatgtttgcttcccttcacccaaacacttctggaaagagttgtctgcagtgactctttccagttcctcaccccgccccaccgtagttctcttcctaaccctctccaacaccactttcatccccagactgctttcttgctcttgagttcaccagtgacctaatcagtgtctgagcatcattcagcacagttggactctctcttggcttctgtgacctggaacttctggtttcctctctacctcatcctccactccatctcatggcttttcctcttctaacctctaagtcagagggccccctagagctctgtcatgggttttctccctcagcattctcttccctagaagtttccattccattctcaagctcttaataccacctataggccagtgacccttacatttattactaatcttgacctctccccagagctgctgtcttagatacctagctgcttatgcgatgtcttcacttggatatctgacaaacatcttgtttccaagagagaactctttattctccctcttgctaagattccatatcaggacatagcattatgtttgccagttcctaggagttacttataattccttccttacccacatccgcatatccagtcatttgggaggtcctgtcatttcttcccccagaatcttatctcagacccaaccgtttccctcctgcacttctaccacctgatccagactacttctctctcaccctgattctggcagtagcctcctaactgatagtactcacaccagtaattcagggagcttctggagttatcctttagaaatgtaaatgaaacagtgtcaccactgcttcccttcagactcttccaaggcttctctttttttttttattgagacagagtctcactctgtcgcccaagctgcagtacagtggcaggatctcggctctctgcaacctccacctcccgggctcaagtgattctcctgccttagcttcccgagtagctgggattacgggcgcatgccaccaggcccagctaatttttgtatttttagtaggaacagggtttcaccatgttggtcaggctgatctcgaactcctgacctcaagtgatccacccgcctgagcttcccaaagtgctgggttataagcgtgagccactgcacccagccccaaggcttcttactgcactcagaataaaatccaaatgaattagtatagcctacagagtgtcaataatctgggcctaatcacccattgcatcatcctttactgtgctccacccatgctggcgtcctttctgtttattgagtgcagcaagctttaacctgttcgggtctttcatttgcagtttaccctgaatattccctttctcttacctcacctttgattggcgttttcccccttgcagacctgcactctggcatcctctcctgagcaagccttctttgattgctgcctcccaaacctgtttctccccatttctctagctcattggcctgtgttacttgcttcatagtgctcactactatctgaaatcatttcattacttgatttatgtttgtactgtctatttctgtctttagaattaaaactccttgagggcaaggactttgcttctctggttcatggtgggatcctcatcacccagcacaagcccaacacttaggagaggctcagctagtttgaaccaatggaaaatgccattcctgaggtgcaccacatcgtttcttttgtgttggtgtgcatgctgtccttcagtttgtctcctcttcccacaccctgtcatgtgctcctaaaactccccctttacttggctactttatctggcttggcaaagctttcccatatcccctgacccatgtcagggaacgtttctcctcattgctgtcatggcaccctgtgtgtggctctgaccagactttgctatccgctttgatttctgtctttcaggggctaagtcctgcctacatcctcagtcagcatgctgcctaacacataacagatcctaagcaaatattgggtggatgaaaatcactaccattcaaggcttcattgtatttatcagtaaaactgaaataatatctaatggggtcgagaagatttactgaaaatatatatttgaaagggctttgcagttttaagtactgtacctatgtgcattgctgttacattcaggagatttctgagttttagacagtcccaagcttcagcttaaaatctgtagactgcagcccgtttctgaaacgtttgtactacgtgttgactaggaggaacaatgacagactctgtagtcaccggaaatacttaaggaatcatgaggtactatgtatttccttaaattatactgttttttaaagctgaagtatctaatagttaatgggttgtccaaatttgtcagaacatttgactgtaatttaatgtctcaccatttttcaaaaagatatattaataccaaatattaaaatgtgtcaagactaaatctgagttagtgtcttaacacacattttccaaaatctgtccgtgatcagggtacccaaatgagatgaaaagattagggatttgtagtctacatctggtgtttacagataatgttttattgggcaagtcatctcattcctcttgtcctggattcccatgaattttcatctggattcctacgcagattttagctgaagagggcaaagttgacttcccactgtgggctggacattaccttcccttgcagactcatttgatctcaacaagtgtagaaaaaatactacaacactctgtttctgtgacatctgcttaaacccaaacaattcttaccttctctctcttacatacacataacacctggtaaactgtgggtgatgattttctgtttgcaaaacactcgagtccagtacctaaaagttgcagataagaaagataattataaaataagctctatggcatgagaacatacgttaagcaaacagttgtcatgaacagcactgaaatgtagaaaaagttagaaatgtgtcagcttgtcccaaaacagtttgaaatagtataaatgcatcaaaaagtaacaaacagaatcggggcagagggaaaatgagggctgtaaacattgattcactaatgaatctagttgtccagtccagttgctagaggaaggcagccaagttacctctgagcttcagagggggaaaagcagaggagaaaacatttacctaaaagttttatggtgcccataagataaaaaaaaaaaaaaatcatagacttaagaaaagcacagattttatttgtgtgtttgaataagcgttttgtaaagtatgtgagtatccagaagagaagtccaacattttcataactggtaataataatctgcacagctccccccacagtgtgcttcactgtgggttgatggcataaggctgacatccaaattcagaggaaactgttctgagagggccacaaacatgattgcgtaaagctctcatggcctgaaaagggaaaatttagagggatgatagactgctttaaaccaatcttttgtaaaagctatttctccgcagtgcaattttgataattcagacatacaattcacatcttttttttttccctctctgtgaggaactagaatttgggaattttatgttgcccattaagaccaggttcaattatttgacaatcatccagtcagaagaacttttgcactcctcttacaaaaagaacgtaaggcagtagttgataggggaaggtctaaaactccttgatattaaatgcaaaacatttattaatgttaataatagtaatataataatattaaatgcaaaaaatgtgcattgtgcatttttctggggagaaggttcataattttcattagaatcttgaaggtgtctgtgaatcaaaaagagattaaaaaccatagctttagggactagagttgtcccagaatggtatcccatttcctggggagagacataaaattggaggagtccaacctctcccttctggggctgaattttaaagtgcagttgaatagtcattcaaaatttaagcttttcaataataaaaagacaattcagttcaaaaatggacaaaagattggaatagacatttctccaaagatgtacagatggctattaagcaaatgaaaagatgttcaacatcattagtcatcagagaaatgcaaatcaaaatcaaaataagataccattacacatccactataataaaaaaaaaatggacaatcacaagtgttgaagatgatgtggagaaattggaacactcatatgttgctgatgggaatgtaaaatagtgcagtcactctggaagacagtttggcagttcctcaaaaagagttaccatattacccagcaataccaatcctaaatatatgctcaagaaaaatgaaaatatatccacacaaaaatttgtacacaaatgatcttagcaacattattcacaataacaccaaagtggaagcaacctaaatatccatcattgatgaatgaataaacaaaatgtatatccatgtaatggaatgttatttgggagcaaaaagatttgaatgaagtattatactactgatgccacagcatggatgaaccttgaaaacaggaagaaagcaaaaaaaaaaaaaatcacatattgtatgactccatttacatgaattgcccagaattgacaaatctgtagagatagaaaatagattggtagttgctagggattggcggcggaaggttggggtgggaaatggggtggggataggaaggattgggaggtgaagactaaagggtatggggtttctttttgagatgaaaatgttctaaaattgattgtgatggttgcacaactctgaatataacaactaaaaacaactgaattgtgtactttaaatgggtgaattatatagtatgtaaattatatcttaatcactgttaccaaaaaaaaaaaaaaaaagcctctgatgcatggcagctccttaaaaatatcaagtttatattaagggaataccacaacacatatagcacaagctattctaaagttttctattttcaactctcagttcacaggagtaacggtacctttcttggagagagtggatgttcaagctctgttaatcattgcttgtggtgtggggtggctctgcactgtgcaatattgtggggcagagggccaggggcctgcacaccgcaggggttcctgctcttccgggtgggagttcagtcttggtgctgcttcctgttaggcgaggttgcaggcagcaaaggccactcatcagccaggcagtgtcttggctaagtgtattctaaggagaagctgcaggaatgcttggcgctaacctcagtgcttagaggaggactgtttacaaacactttagagggttacagaccactgatgtggaatatgagcatattgaagttctgccctaagactgcttagcaagtccctcagtatctctacaagcatgactgggcaaagtaaagaaagaaaagccaagtacattacctaaacctgctttatttctttggctatgagaaacagatgagctaagatactctttgaaactagtcttcctagtccttttctggagtggctatccctttgacaggcatccactgtggatgggctaatcatcagttcccagagctgtcctgatttctgtggcaccagctttgggaggtaatgggggcctctcagtgggccagctcttggatttgtcttgccattgatgtatagcataaacccaaacagcccaccagtccctgacttttctgcgacctaggacatgtgtttcagatccccaacttaaataaaatacaacaaacaagaccggaagtgttatctcccagttagtttcttcagccacaggcaagcatagcccttggtcccaacaggagcatgcactgcaaccctgcaggttcctgtgtaacccaacagggcagtggctggggcaggagctcagtgcttccccaaggatccccttttctggaagacaggcccctcagcccagcatggaaccccagcagtagcctgttcatattaataaattctggaccatgggcaaaggacaggaaaggttccagattggtgatatgttcaacctgctacctcctgcatgagctatggcttgtagactaagaaggcatcacctgatctgtttattttgctccaaaaaggtttaacattaacccattgtttaacaacaccaagcaattccagacgcttccccaggcaaagtcattccttaaatccacatttctcaagctgttttccagagatccaaaatatttgaagtattaagtgttttattagtccattttcatgctgctgataaagacatacctgagactgggtgatttacaagagaaagaggtgtaatagacttacagttccacgtggctgaaacctcacaatcatggcggaaggcaaggaggagcaagtcacatcttacatggagggcagcaggcataaagagatcctgtgcagagaaactcccctttttaaaccatcagatcttgcgagacttattcaccatcacgagaacagcgtgagaaagacctgcccccatgattcaaccaccttccaccagattcctcccacaacacgtgggaattcaggtgaaatttgggtggggccccagccaaaccacatcattccacccctggactctcacatatcttgtgtcctcacatttcaaaaccaatcatgccttcccaacaatctccaaaagtcttaacttatttcagcattaactcaaaagtccatagtccaaagtctcatctgagacaaggcaaatctgagccgatgagcctgtaaaatcgaaagtgagttaattacttctcagatacaatagggatacaggcgttgggtaaatatacccattccaaatgggagaaattggccaaaacaagggggctgcaggccccatgcaagtccgaaatccagcggggcagtcaaatcttaaagctccaaaatgatctcttttgaccccatgtctcacatccaggtcacgctgatgcaaaaggtggcttcccatggtcttgcacagctccactcctgtggctttgcatggtacagcctctctcccagctgctttcatgggctggcattgagagactgtggcttttccaggtgcacggtgcaagctgtcggtggatctaccgttctggggtctggaggacaatggccctcttctcacagttccaccaggcactaccctagtggggactctgtgtgggggctctgaccccacatttccctttcgcactgccctagcagaggttctgcatgaagacccaacctctgcagcaaacttctgcctggatatgcaagcgtttctatacaccctctgaaatctaggtggaggttcccaaacctcaattcttgtcttctacacacttgcaggactaacaccacatggaatctgccaaggtttgggacttgcaccctctgaagctatggcctgagctctacgttggccactttcagccacagctggagtggctgggacacagggcaccaagttcctaggctgcacacagcatggggaccctgggcctggcccatgaaaccattttttcttcctaggcctccaggcctgtgatgggagaggctgctgtgaagacctctgaaatgccctggagatattttccccattgtcttggggattaacattcggctcctcattacttatgcaaatttctgcagctggcttgaatttctcctcaagaaagtgggatttgctgttctattgcattgtcaggctgcagattttccaaacttttatgctctgtttctcatttaaaacaatgcttttaacagcacccaagtcacctgttgaatgctttgctgcttagaaatttcttctgccagataccctaaatcatctccctcaagttcaaaattccacaaatctctggagtaggggcaaaatgccaccagtctctgctaaaacatagcaagagccacctttgctccagttcccaacaagttcctcatctccatctgaaaccagatcagcctggatttcattgtccatatagttatcagcattttggtcaaagccattcaacaagtctctaggaagttccaaactttcccacattttcctgtcttcttctgagccctccaagctgttccaacctctgcctgctacccagttccaaagtcgcttccacattttcaggtatcttttcagcaacaccccactctactggtaccaatttactgtattagtctgttttcatgctgctgataaagacatgcctgagactgggcgatttacagaagaggtgtaatggacttacagttccacttggctgggaaagcctcacaatcatggcagaaggcaagaaggagcaagtcacatcttacatggagggcagcaggcaaaaagagagcctgtgcagagaaactccccttgttaaaaacatcagatctcatgagacttattcatcacagacttattctgtgctgtcatgagaacagcacaggaaagacctgcccccatgattcaaccacctcccactgggtccctcccacaacgtgggaatttaagatgagatttgggcagagacacaaccaaatcacatcaagtgttttttaagaatatgccaaaacagaatggaaaacacagcaagtcaaattccccagagccaggtcagcctctgaatgggattaggagtgccctctctccctcccactggcaagcatcttgcctcagcctcctctgttgcttcccaaatggaatgggagctggtggcttaggtacttagaggttctttaccttctgtgtgtcagggatgcctctggcagagttgaggagcctatggacccctcagaataatgactaagtgcataaagtaagatacaaaggccgggtgtggtggctcacgcctgtaatcccagcgctttgggagaccgaggcaggtggatcatgaggtcaggagatcgagaccatcctgactaacatggtgaaaccccgtctttactaaaaatacaaaaaattagctgggcatggtggcgggcacctgtagtcccagctacttgggaggctgaggcaggagaatggcgtggacccaggaggcggagcttgcagtgagctgagatcgtgccactgcactccagcctgggcaacagagcgagactctgtctcaacaacaacaacaacaacagcaacaacaacaaaagatacaaagcattaaatggaaaataaaatatcatcattcagttatgaaaacctaagaaaaaacaaatttgtgatgtagtattatatgcacttctttgttaactcattaaataacaagactgagtggcaggtctatcacctaccatgcttttgaagtggggacatatgaaagtaatgttttaatatgtccatcacaattgtaatgagctatgaaaatatctgtgatttctattggaataaagctaaaggtactgctagcactgtggcctatactcataatggaagaaaagtacatttcagtcagaggttattgaaaataaggatgtcagtttttcccacccaagttcatggaaccctaaattgtatccttggatccttgggaagtgtctgtggactccaggttaagaatttagaggcctacttatgttttatctcatgcctggtcatgttggttccctgcgaacattcacttgtttacaggaggcagtatttgtgcttaatgtcagtcttgactctaagaacttagtctttttttaaaaaataatttcaacttttattttaaattcagggggtgcacgtgcaggtttgttacatgggtgtactgcatgatgctgaggtttgggatatgaatgatcccaatacccaggtagtgagcatagtatccaatagacagtttttcaacccttgctcccctcccttcttcctctttctatccccagtgtctattgttgccatctttatgtccgttactacccaatgtctagctctcacttgtaagagagaacatacagtatttggttttctgtttctgccttatcttgcttaggataatggcctctggctgcatccatgttgctgcaaaggacatgatttcattcttttctatggctatgtagtattccatggtgtatatgtaccacattttctttatctaatccgctattgatgggcacctgggttgattctatgtctttgttattgtgaatggtgtactgctgaacgtatgagtttatgtgtctttttggtggaatgatttattttcttttatatatatacctagtaatggaattgctgggtcaaatggtagttctgttttaagttcattgagaaatctccaaactgttttccacagtggctgtactaatttatattctcaccaacagtgtataaagcattcccttttctctgcgaccacaccagcatctgttgtttttttgactttttgataatagccattctgactgatatgagatggttatctcagtatggttttcttttgcatttctctgataattagtgatgttgagcattttttcatatatttgttgactgcttgtatgtcttcttttgagaagtgtctgttcatctcttttgctcactgtttaatggggttgtttgctttttgcttgttgagttgtttaagttccttatagattctggatattaaatctttgtcagattgtttagtttgaggatatgttctcccattttgtttactctgtagaaagtttcttttgctgtgcagaagttctttagtttaattaggtcccacttgtcaatttttgtttttgttgccgttgcttttggggacttagtcataaattttttgcctaggctgatgtccagaatggtgtttcctaggctttcttctaggtttcttataatctgaaattttacatttaactctttactccatcttgagttaatttttgtgtacaatgaaaggtaagggtccagtttcaatcttctgcatatggttagccagctatcccagcaccgtttgttgaataggaagtcctttccccatggtttatttttgttgactttgttgaagatcagatggctgtaggcatgtggctttatttctgagttttctattctattccattggtctatgtgtctgtttttgcacctgtaccatgctgttttggttactgtagccttgtagtatagtttgaagttggatagtgtgatgcctctggctttgttctttttgcttagggttgctttgggtattctggctaagtaagagcttagcctttaaatgggctgagataataaatcaacttacccaagcaaggtaatattaattttttttattcatgacatactttttggaattttggagaactattgttctgcatctgacagatcagagcattctgcctgtgttagagttaggccctgaggttttggaagccctcagcatttaggacagcatttagggcaagcctgggatggtgagtgctcttctcctggggcttcttggaagaagaccaggtttgaacaagcacactacagtctctgtaggtcacaatcccaatgcttgacatgcagcctcgtgggctggctgcatatgatcagggagaagctggaccactcagccatttcctctgcagagttgcagggtatgctactgtcctctgtggacaaggggcctatagcactattggaggagctggtgctctgtgtgctccaagataattgctcactgccgaagtgcagctccttaggactggggtgagaagagagatggaggagcggcttctgcagggagaccagacagagctcaggtgggcacagctctagacagcagtcccaaatctgtttttacaaagcaatccaacagtttctgagtctttctgaaatctcaagatgcattttggatccttgacctaaacttaaacactacaaacaaggccaaaactattatctagtgatgtgtcagacaattacgtctgtctgctgctggcatgctctgctgcctctcatgccaagctacagggtgcctgctccaacaagaaatataattcttcaaattagcatttctcattattttttaacactggatctaaaaatatttgattagattcaaaatttatccataatattgctaagattttgtttttttggttatagagtcccactctgtcacccaggctggagttcagtggtgcagtcacggcttactgcaacctccacctcctgggctcaactgatccacctcagcctcctgagtagctgggacttcaggcacgtgccaccacacctggctaattttttgtatttttttttgtagagatggggttttaccatgttgtccagtctggttttgaacttcgggattcaagcaatccgccagcctcagcgtcccaaagtgctggaattacaagtgtgagctaccaccactggcagttaagaattttaacaatttgtcaatgaaacaagaatctcaattagagtctttatatacaatctgtactgttggaattttcaaataaatattgtaaagaaaattaacactattttgccaaagcttctcatcaatacggactatgaagaatttaaagactgtcactaaaaacatcaggaattttcatgctagaaagcttaagataactcnnnnnnnnnnnnnnnnnnnnctttctttggagacagggtctcactctatggccctctttctccctccctccctccctcccttttttcctttctttcctttcttcctttctttccttttttctttcttcctttggagacattggctcactctgtggccctctttctccctccctccctccctccgtttcttcctttctttcctttcttcctttctttccttttttctttcttcctttggagacatgggctcactctgtggccctctttctccctccctccctccctccctttcttcctttctttcctttcttcctttctttccttttttctttctttctttggagacagggtctcactctgtggccctcttcctccctccctccctccctttcttcctttctttccttttctctttctttctttggagacagggtctcactctgtggcccaggtaggagtgcattggcataatcacggctcactgcagcttaggcatcctggcctcaggtgatcctcccaccttagcctgctgagtagctgtgattacaggtgtctgccaccacatctggctaattttttaaattttttgtagagatggggtttccctatgttgcccaggctggtctcgaactcctgggcccaagcaatccaccctaggcctcccaaagtgctaggattacaggcttgagccactgtgctgggccataggattttcatcaaatatttttgcaaagattgtattagaagtttcatataaatgcaatatttcttaatacttgcattttattttcatcatcataattacatattgcagagaaatgcaatgacttttacatgtaagcccccttaaattctctccagtttaccccacaggtgtaaatataattgtttatgcttttcacgggaagtcttctcttgaatgttgggcctttggatgaaagagccttggtggtgaagccctggtatggtttctgggacattgcaagccagccctttctcctcttcttttatgcttccactaaaatatttctgcagttaaaatttattttgattaatgcttaaacatacatgggctactcagaatgacagtttatccatttattaattcattcatcaaacattaatcaagcaaacccctcatcttagaagactgagttcctgctattccctgaagatgccagcacagaagacacagatgccagctcccttcctgctccaagaacctctgacaagtgcgcatggcagtactagtaacacacctgtgcccttagcaatttgtatcaccaatgcttgaaaccccagtgcccagggcagtgaggcccagtgaaatgagactgagagcggagaggtagggcctcaaagccagcttgccacttagcagctgtatgcccttgggcagtttcttcatatgcagaatgtggactatgatcctaattcatcaaggctgtcacaaggccaggtgagatgctgaaaagggaagacaataaaaatgctgtagatggaactccgtatgtaacttcagccacccaagagggcagctgtaggaaggcatcagggcaggaagttgaccctggcctcggggtctgggagacaatagaggggcacgcgtggggtgacttggagagccagcccatccaaagggaggaactaaaacggctccctgtgttcacgggcttctcaggaaaagctggctgctcaattttttaatgccattttcctggttttcaaatgttagcaccaattaacttaaaacaaacaaaaaacaacactgcgcaggccaaacagtaaagtttgtaacctctgctcacactagtgttggcgtagtaaagatgtcctgggaccatgatgcattactgcagttaagattcccaggaaagggagtgggggcccagcaggaggagagccatcttcccttgtctgcagggctccaaacaagactggagccacagaaactggccacccatcatatgtcccttcaaccagaatggggctgtttttgcaatagagtgccatctataaagaaccaaagccaaaaaacttctaggaaaaaaaaaataggagaaaattgtgaccctgggttaggcaaagcttctttttaaaaaatagtagcatgggatgattttttctcttggatttaacaaatgtcaacatttcatcatatatgcttcacacttgtatggaaaaaaagcttaccaaaaacttttttgtggccttttctaatccactttttttttttttttttttttttttgagatggagtctggctgtgtcacccaggctggtgcaatcttggctcactgcaagctctacctcccgagttcaagcaattctcatgcctcagcctccccaagtagttgggactacaagtgtgcgccaccatgcctggctaattttttatttttaactttttttttcttactttgagttctggaatacatgtgcagaatgtgcaggtttgttacacagctatacatgtgccatggtggtttgccgcacctgtcaacccatcatctaggttttaagccccaaatgcattagctgtttgtcctaatgctctccctcatctttccgtccacccccgcgacaggcctcagtgtgtgttgttcccctccctgtgtccctgtgttctcattgttcaactcccacatatgagtgagaacatgcagtgtttggttttctgttcctgtgttagtttgctgaggatgatggcttctggcttcatctgtgtccctgcaaaggacgtgatctcattccttttcatggctgcatagtattccatggtgtatatgtgccacattttctttatccagtctatcattgatgggcatttgggttggttccatgtctttgctattgtaaacagtgctgcaataaacgtgtgtgcatgtgtctttatagtagaatgatttaaattcctttgagcgtatacctagtaatgggattgctaggtcaaatggtatttctggttctagatccttgaggaatcaccatgctatcttccacaatggttgaactaatttacattaccaccaacagtgtaaaagcgttcctatttctccacagcctcgctagcatctattgtttcttgactttttaataatcgtcattctgacttggggttttttttttttttttttttttttttgagatggagtcttgctctggtcacccaggctggagtgcagtggtgcgatctcacctcactgcaacctctgcctcctgggttcagatgattctcctgcctcagcctcttgagtagctggacctacaggcatgcaccaccatgcctggctaatttttgtatttttgtagagatggagtttcaccatgttgaccaggttggtcttgaattcctgatctcaagtgatctgcccaccttggcctcccaaagtactggggttacaggcgtgagccaccatgcccagccctcactgtgattgatttgcatttctttaatgatcagtgatgctgagctttttttcatgtttgctggctgcataaatgtcttcttttgagaagtgtctgttcatattctttccccactttttgatggggttgtttttttcttgtaaatttgtttaagttccttgtagattctggatattagatctttgttagatgggtagattgcaaaaattttctcacattctgcaggttgcctgttcactctgatgacagtttcttttgctgtggagaagccctttagtttaacacttggctaatttttgtatttttagtagagacatggtttcaccatgttggctaggctggtctcgaacttctgacctcaagtgatccacctgccttggcctcccaaagtgctggattacaggcgtgagccactgcacctggcccccacaccatttctttagcagaaacaactgctatcctggtgatggtgttaacacttgacaaccgtatttttgtatgtatacatattcacaaacaacacatagtgtgatttcatgtattataagaagtatataaggcaacaccatacatgaaatttgcaaccagtaaatgagaaccttaccaggtaacttatatgttgtccttggggtaggtttggtttatgcagagctggtttttgcactttaccgggaataatgtgctttcccaggaattgctgggtttatgtttaacttttaaaaataccaagctgttttccaaagtggctaagctattttatattctcatcagcaacatttgagggtttcaatttaaccacatcctcaccaatgcttgatagctgttagtcttttagattataaccattctagtgggtgtgtactgataacgcattgtggtattaacttgcatttccataatgactaaagtgagcaccttttcatgtgcttattagctatgnnnnnnnnnnnnnnnnnnnnagcaccttttcatgtgcttattagctatgcatatgttttctttggtgaaatgtacattcaaaccttctgcgcagtttttaattgggttgtttattttcatattatgaaagggtaagagttctttatatattcaacacagtaattctactgctaggtacctagaagtaagagtatatatccacatttgtatgttgatataaagacatcattcgaatgtctatagtggcattactcataatagccaaaatgtaaatgtttatcaactggtaaatgaataaaaaatagtatatccatgcaaataatactatatagcaatacaaaggaatgaagtactcatacatgctacaacatggatgaaacactaaaacacactaagggctgggcgtggtggctcattcctgtaatcccagcactttgggaggccaaggtggatcacctgaggtcaggagtttgagactagcctggttaacatggtgaaatcccatctctacaaaaatacaaaaattagctgggcatgatggtgggtgcctgtaatcccagctactggggaggctgaggcgggagaatcgctttaacctgagaggcagaggttgcagtgagctgagattgcgccattgcactccagcctgggcgacagagtgagactccacctcaaaaaaaaaaaaaaaacactaagtaaaagaagccaaaagattatatattgtatgaatccatttatataaagtcaggaaggcaaatctataaagtagtggttgcctggggctgtgggtgggtatgtggaagctttctggggtaactgaaatgttctaaaactggattgtggtgatggctgtacaactctaagaatttacaaaaattattaaaatgtgcacttatacagagtgaattttatgatctaaaatttacatcccaataaagctgtttaaaaacaaacacacagacaaacagaaataataccaaccataactaaattcatgtagaaagtagaagagaattcttttcaactttttcttttaggctggcaaaaccgtgataccaaaaggtgacaaagacattattaaaaaagaaatttatggacaaatattcctcatgaacacaaatgcaaaagtcattaacaaaatattagcaaattaagtctattaataaagaacaagcttaatacatcatgacaatatggggtttatctcatatgaattcaaggttgatataacatttgagaaaaaatagagttcaccacatgtgaacgacagccctccaaaaatatctatgccctaataatccctgcaacctgtaattatcttgcatgtcaaagggaaattaaggtgccaaagggaaattgaggtagccaatgtaattaatcagctaaccttaaaatatgcagattatcatgaattacctagttgggtctcatgtaatcacagggacccaagtgtggaagagggaggcagaagagtatcagagtgatgtggtatgagaaggactccactggccattggtggttatgaagatggatgggggccatgagccaaggagtgcaggcagcctctagaagttgtaaaaaatacaaaaactaattctcccatagaccttccaggaaagaacacagccctgttaacaccctgagtatagctcagagaacctcattttgtacttttgaatatacagtaaatttgtgttaagtcactagctctgtggtagtttgttacagcagcaataagaaatcgatataccacattaacgaaataaaaaattatatgggcccagacgcggtggctcacacctgtaatccaagcactttgggaggccaaggcggtggatcacctgaggtaaggagtttgggaccagtctggccaacannnnnnnnnnnnnnnnnnnnnnnnnnnnnnnnnnnnnnnnnnnnnnnnnnnnnnnnnnnnnnnnnnnnnnnnnnnnnnnnnnnnnnnnnnnnnnnnnnnnnnnnnnnnnnnnnnnnnnnnnnnnnnnnnnnnnnnnnnnnnnnnnnnnnnnnnnnnnnnnnnnnnnnnnnnnnnnnnnnnnnnnnnnnnnnnnnnnnnnnnnnnnnnnnnctccgcctcccgggttcacgccattctcctgcctcagcctcccggtagctgggactacaggcgcccgctaccacgcccggctaatttgttgtatttttagtagagacggggtttcaccgtgttagccaggatggtctcgatctcctgacctcgtgatccgcccgcctcggcctcccaaagtgctgggattacaggcgtgagccaccgcgcccggccgaaaacatttttttaaaccagaaatagaaatagcagactttaagataaaaagcatgatcaaataaaaaaggagagatttaatgatgataaagtgtccatctgtcagaagatataaaattctaaattatatgccactaataatatagcctcagggaaaaaaactggcagaaatagaaggaaaaggaaattataactacagtggatgggttttttaaaaaattatactttaagttctagggtagatgtgcacaacgtgcagatctgccacataggtatacatgtgccatgttggtttgctgcacccatcaactcatcatttacattaggtatttctcctaatgctatccctcccccagtcccccatcccccacaggccccagtgtgtgatgttccccagcctgtgtccaagtgttccctctgttcaactcccacccaagagtgagaacatgtaatgtttggttctctgtccttgtgatagtttgctgagaatgttggtttccagcttcatccatgtccctgcaaaggacatgaacacatccttttttatggctgcatagtattccatggtgtacatgtcccacattttcttaatccagtctatcattgatggacattgggttggttccaagtctttgttattgtgaatagtgccacaataaacatatgtgtgcatgagtctttatagtagcatgatttataatcctttgggtatatacccaataatgggattgctgggtcaaatggtatttctagttctagacccttgaggaatcaccacactgtcttccacaatggttgaactaatttacactcccaccaacaatgtaaaggcacttctatttctccacatcctctccagcatctgttgtttcctgactttttaatgattgccattctaactggtgtgagatggtatctcattgtggttttgatttgcatttctctgatgaccagtgatgatgagcatttattcatgtgtcttttggctgcataaatgtcttcttttgagaagtgtctgttcatatcctttgcccactttttgatggggttgtttgtttttttcttgtaaatttgtgtaagttctttgtagattctggatattagccctttgtcagatgagtaggttgcaaaatttttctcccattctataggttgcctgttgactctgatggtagtttcttttgctgtgcagaagctctttagtttaattagatcccatttttctattttggcttttgttgccattgtttttggtgttttagacatgaggcctttgcccatgcctatgtcctgaatggtattgcctaagttttcttctagggtttttatggttttaggtctaacatttaagtctttaatccatcttgaattaatttttgtctaaggtgtaaggaaagggatccagtttcagctttctacatatggctagccagttttcccagcaccatttattaaatagggaatcctttccccatttnnnnnnnnnnnnnnnnnnnnnnnnnnnnnnnnnnnnnnnnnnnnnnnnnnnnnnnnnnnnnnnnnnnnnnnnnnnnnnnnnnnnnnnnnnnnnnnnnnnnnnnnnnnnnnnnnnnnnnnnnnnnnnnnnnnnnnnnnnnnnnnnnnnnnnnnnnnnnnnnnnnnnnnnnnnnnnnnnnnnnnnnnnnnnnnnnnnnnnnnnnnnnnnnnnnnnnnnnnnnnnnnnnnnnnnnnnnnnnnnnnnnnnnnnnnnnnnnnnnnnnnnnnnnnnnnnnnnnnnnnnnnnnnnnnnnnnnnnnnnnnnnnnnnnnnnnnnnnnnnnnnnnnnnnnnnnnnnnnnnnnnnnnnnnnnnnnnnnnnnnnnnnnnnnnnnnnnnnnnnnnnnnnnnnnnnnnnnnnnnnnnnnnnnnnnnnnnnnnnnnnnnnnnnnnnnnnnnnnnnnnnnnnnnnnnnnnnnnnnnnnnnnnnnnnnnnnnnnnnnnnnnnnnnnnnnnnnnnnnnnnnnnnnnnnnnnnnnnnnnnnnnnnnnnnnnnnnnnnnnnnnnnnnnnnnnnnnnnnnnnnnnnnnnnnnnnnnnnnnnnnnnnnnnnnnnnnnnnnnnnnnnnnnnnnnnnnnnnnnnnnnnnnnnnnnnnnnnnnnnnnnnnnnnnnnnnnnnnnnnnnnnnnnnnnnnnnnnnnnnnnnnnnnnnnnnnnnnnnnnnnnnnnnnnnnnnnnnnnnnnnnnnnnnnnnnnnnnnnnnnnnnnnnnnnnnnnnnnnnnnnnnnnnnnnnnnnnnnnnnnnnnnnnnnnnnnnnnnnnnnnnnnnnnnnnnnnnnnnnnnnnnnnnnnnnnnnnnnnnnnnnnnnnnnnnnnnnnnnnnnnnnnnnnnnnnnnnnnnnnnnnnnnnnnnnnnnnnnnnnnnnnnnnnnnnnnnnnnnnnnnnnnnnnnnnnnnnnnnnnnnnnnnnnnnnnnnnnnnnnnnnnnnnnnnnnnnnnnnnnnnnnnnnnnnnnnnnnnnnnnnnnnnnnnnnnnnnnnnnnnnnnnnnnnnnnnnnnnnnnnnnnnnnnnnnnnnnnnnnnnnnnnnnnnnnnnnnnnnnatcccagggatgaagccaacttgatcatggcacataagctttttgatgtgctgctagattcggtttgccagtattttattgaggatttttgcaccagtgtttatcagggatattggtttaaaattccctctttcttattatgtctctgccaggctttggtatcaggatgatgctggcctcataaaatgagttagggaggatcccctctttttctattgattggaatagtttcagaaggaatggtaccagctcctctttgtacctctggttgaattcggctgtgaatccatctggtcctggactttttttggttggtaggctattaatttttgcctcagttccagagcctgttattggtctattcagagattcaacttcttcctggtttagtcttgggagggtgtatgtgtccaggaatttatccatttcttctagattttctagggttttttttgttttgttttgtttttttttgcatggaggtgtttatagtattctctcatggtagtttgtatttctgtgggattggtggtgatatcccctttatcatttttaattgcgtctatttgattcctctcttcttctttattagtcttgctagtggtctatcaattttgttgatcttttcaaaaaaccagctcctggattcattgattttttgaagggattt

SEQ ID NO: 2406 - DNA, 2658 bp, Homo sapiens
tgggtgagttcatttgctcgcgtgcaggggaagtctggagaaggcattgtttcaattattaaaagtgtgggggcagtgggcggaacaaacgcgccgactacagaggctggacgtaagcttagcggtggcgcgcgtgcgcagcgccggcccgagttgccaaaacaaaggggatttggtgatggaggctttgttagaaggaatacaaaatcgagggcatggtgggggatttttgacatcttgtgaagcagaactacaggagctcatgaaacagattgacataatggtggctcataaaaaatctgaatgggaaggacgtacacatgctctagaaacttgcttgaaaatccgtgaacaggaacttaagagtcttaggagtcagttggatgtgacacataaggaggttggaatgttgcatcagcaggtagaagaacatgaaaaaatcaagcaagagatgaccatggaatataagcaggagttgaagaaactacatgaagaattatgcatactgaagagaagctatgaaaagcttcagaaaaagcaaatgagggaattcagaggaaataccaaaaatcacagggaagatcggtctgaaattgagaggttaactgcaaaaatagaggaattccgtcagaaatcgctggactgggagaagcaacgcttgatttatcagcaacaggtatcttcactggaggcacaaaggaaggctctggctgaacaatcagagataattcaggctcagcttgtcaatcggaaacagaaattagagtctgtggaactttctagccaatcagaaattcaacacttaagcagtaaactggagcgggctaatgacactatctgtgccaatgagttggaaatagagcgcctcaccatgagggtcaatgacttggttggaaccagtatgactgtcctacaggagcagcagcaaaaagaagaaaaattgagggaatctgaaaaactattagaggctctgcaggaagaaaagagagaattgaaggcagctcttcagtctcaagaaaatctcatacatgaggccagaatacaaaaggagaagttacaagaaaaagtaaaggcaactaacactcaacatgctgtagaagctataaggccacgggaagaatctctggcagaaaagaagtacacctctcaagggcagggggacttagacagtgtgctctcccagttgaattttacccatactagtgaggaccttctgcaggcagaggtgacttgtcttgaaggcagtttggaatctgtgagtgcaacgtgtaaacagctgagccaagaactaatggaaaaatatgaagaactgaagaggatggaagcacataacaatgaatacaaagcagagattaagaagttgaaagaacagattttacagggtgaacaaagttacagttctgcactagaaggaatgaagatggaaatctcccatctaactcaggagttacatcagcgagatatcactattgcttccaccaaaggttcttcctcagacatggaaaagcgactcagagcagagatgcaaaaggcagaagacaaagcagtagagcataaggagattttggatcagctggagtcactcaaattagaaaatcgtcatctttctgaaatggtgatgaaattggaattgggtttacatgaggcaaaagagatttcactagcagacctccaggagaattatattgaggcattaaataaattagtgtctgaaaatcaacaactacagaaagatttgatgaataccaaatctcagctggagatttctactcagatgtgcaaaaaacaaaatgacaggatctttaaaccaacacacagcagaacaactgagttcaagaatacagagttcaagccaacccatggccagcacagacatgatggaataaagactgagcactacaaaacagatcttcattctccaagaggacaagcgtcggatagtataaaccccatgtctagggtgctaagccccctgagtcctcaaatcagcccttgcagctccaccaggtctttgacttcctactctctatgtaaaactcattctttgccttcagcgctagatacaaatgaagccaatttttctgacactatgtctgagagtatgaatgaccaagaagagtttatatcttcgtgttccttgcctgtatctccccttggttcaatagctaccagatttttggaagaggaggaactgaggtctcatcacattctagagcgcttggatgcccatattgaagaactaaaaagagagagtgaaaagacagtgagacaattcacagccttaaagtagcctcttaaaaaaatcacaatcttggaaataaaaataaacaccaaagagttactgtcatctgaagtagcagctctttaaaaacatgaagagataaaattataaaaatgatacatctaaagcagtggtgaagaaagctgaaaaactgatacttttgataggcattttctctgcactggtttgtttaaaggacttcttccagcaataagttgaaagaataaaccactttgctagacttttttctcatacgaatatttattatcataaagtgatacttaccttgctgacttaaatgtgaatagctatgtactaattgaaataaggattttatgatacatgttgaaaataaagtaactgcaggaactttcttt

SEQ ID NO: 2407 - protein, 699 aa, Homo sapiens
MEALLEGIQNRGHGGGFLTSCEAELQELMKQIDIMVAHKKSEWEGRTHALETCLKIREQELKSLRSQLDVTHKEVGMLHQQVEEHEKIKQEMTMEYKQELKKLHEELCILKRSYEKLQKKQMREFRGNTKNHREDRSEIERLTAKIEEFRQKSLDWEKQRLIYQQQVSSLEAQRKAEQSEIIQAQLVNRKQKLESVELSSQSEIQHLSSKLERANDTICANELEIERLTMRVNDLVGTSMTVLQEQQQKEEKLRESEKLLEALQEEKRELKAALQSQENLIHEARIQKEKLQEKVKATNTQHAVEAIRPREESLAEKKYTSQGQGDLDSVLSQLNFTHTSEDLLQAEVTCLEGSLESVSATCKQLSQELMEKYEELKRMEAHNNEYKAEIKKLKEQILQGEQSYSSALEGMKMEISHLTQELHQRDITIASTKGSSSDMEKRLRAEMQKAEDKAVEHKEILDQLESLKLENRHLSEMVMKLELGLHEAKEISLADLQENYIEALNKLVSENQQLQKDLMNTKSQLEISTQMCKKQNDRIFKPTHSRTTEFKNTEFKPTHGQHRHDGIKTEHYKTDLHSPRGQASDSINPMSRVLSPLSPQISPCSSTRSLTSYSLCKTHSLPSALDTNEANFSDTMSESMNDQEEFISSCSLPVSPLGSIATRFLEEEELRSHHIRLDAHIEELKRESEKTVRQFTALK

SEQ ID NO: 2408 - DNA, 2034 bp, Homo sapiens
tgggtgagttcatttgctcgcgtgcaggggaagtctggagaaggcattgtttcaattattaaaagtgtgggggcagtgggcggaacaaacgcgccgactacagaggctggacgtaagcttagcggtggcgcgcgtgcgcagcgccggcccgagttgccaaaacaaaggggatttggtgatggaggctttgttagaaggaatacaaaatcgagggcatggtgggggatttttgacatcttgtgaagcagaactacaggagctcatgaaacagattgacataatggtggctcataaaaaatctgaatgggaaggacgtacacatgctctagaaacttgcttgaaaatccgtgaacaggaacttaagagtcttaggagtcagttggatgtgacacataaggaggttggaatgttgcatcagcaggtagaagaacatgaaaaaatcaagcaagagatgaccatggaatataagcaggagttgaagaaactacatgaagaattatgcatactgaagagaagctatgaaaagcttcagaaaaagcaaatgagggaattcagaggaaataccaaaaatcacagggaagatcggtctgaaattgagaggttaactgcaaaaatagaggaattccgtcagaaatcgctggactgggagaagcaacgcttgatttatcagcaacaggtatcttcactggaggcacaaaggaaggctctggctgaacaatcagagataattcaggctcagcttgtcaatcggaaacagaaattagagtctgtggaactttctagccaatcagaaattcaacacttaagcagtaaactggagcgggctaatgacactatctgtgccaatgagttggaaatagagcgcctcaccatgagggtcaatgacttggttggaaccagtatgactgtcctacaggagcagcagcaaaaagaagaaaaattgagggaatctgaaaaactattagaggctctgcaggaagaaaagagagaattgaaggcagctcttcagtctcaagaaaatctcatacatgaggccagaatacaaaaggagaagttacaagaaaaagtaaaggcaactaacactcaacatgctgtagaagctataagtttggaatctgtgagtgcaacgtgtaaacagctgagccaagaactaatggaaaaatatgaagaactgaagaggatggaagcacataacaatgaatacaaagcagagattaagaagttgaaagaacagattttacagggtgaacaaagttacagttctgcactagaaggaatgaagatggaaatctcccatctaactcaggagttacatcagcgagatatcactattgcttccaccaaaggttcttcctcagacatggaaaagcgactcagagcagagatgcaaaaggcagaagacaaagcagtagagcataaggagattttggatcagctggagtcactcaaattagaaaatcgtcatctttctgaaatggtgatgaaattggaattgggtttacatgagtgttccttgcctgtatctccccttggttcaatagctaccagatttttggaagaggaggaactgaggtctcatcacattctagagcgcttggatgcccatattgaagaactaaaaagagagagtgaaaagacagtgagacaattcacagccttaaagtagcctcttaaaaaaatcacaatcttggaaataaaaataaacaccaaagagttactgtcatctgaagtagcagctctttaaaaacatgaagagataaaattataaaaatgatacatctaaagcagtggtgaagaaagctgaaaaactgatacttttgataggcattttctctgcactggtttgtttaaaggacttcttccagcaataagttgaaagaataaaccactttgctagacttttttctcatacgaatatttattatcataaagtgatacttaccttgctgacttaaatgtgaatagctatgtactaattgaaataaggattttatgatacatgttgaaaataaagtaactgcaggaactttcttt

SEQ ID NO: 2409 - protein, 491 aa, Homo sapiens
MEALLEGIQNRGHGGGFLTSCEAELQELMKQIDIMVAHKKSEWEGRTHALETCLKIREQELKSLRSQLDVTHKEVGMLHQQVEEHEKIKQEMTMEYKQELKKLHEELCILKRSYEKLQKKQMREFRGNTKNHREDRSEIERLTAKIEEFRQKSLDWEKQRLIYQQQVSSLEAQRKAEQSEIIQAQLVNRKQKLESVELSSQSEIQHLSSKLERANDTICANELEIERLTMRVNDLVGTSMTVLQEQQQKEEKLRESEKLLEALQEEKRELKAALQSQENLIHEARIQKEKLQEKVKATNTQHAVEAISLESVSATCKQLSQELMEKYEELKRMEAHNNEYKAEIKKLKEQILQGEQSYSSALEGMKMEISHLTQELHQRDITIASTKGSSSDMEKRLRAEMQKAEDKAVEHKEILDQLESLKLENRHLSEMVMKLELGLHECSLPVSPLGSIATRFLEEEELRSHHIRLDAHIEELKRESEKTVRQFTALK

SEQ ID NO: 2410 - DNA, 1726 bp, Homo sapiens
tgggtgagttcatttgctcgcgtgcaggggaagtctggagaaggcattgtttcaattattaaaagtgtgggggcagtgggcggaacaaacgcgccgactacagaggctggacgtaagcttagcggtggcgcgcgtgcgcagcgccggcccgagttgccaaaacaaaggggatttggtgatggaggctttgttagaaggaatacaaaatcgagggcatggtgggggatttttgacatcttgtgaagcagaactacaggagctcatgaaacagattgacataatggtggctcataaaaaatctgaatgggaaggacgtacacatgctctagaaacttgcttgaaaatccgtgaacaggaacttaagagtcttaggagtcagttggatgtgacacataaggaggttggaatgttgcatcagcaggtagaagaacatgaaaaaatcaagcaagagatgaccatggaatataagcaggagttgaagaaactacatgaagaattatgcatactgaagagaagctatgaaaagcttcagaaaaagcaaatgagggaattcagaggaaataccaaaaatcacagggaagatcggtctgaaattgagaggttaactgcaaaaatagaggaattccgtcagaaatcgctggactgggagaagcaacgcttgatttatcagcaacaggtatcttcactggaggcacaaaggaaggctctggctgaacaatcagagataattcaggctcagcttgtcaatcggaaacagaaattagagtctgtggaactttctagccaatcagaaattcaacacttaagcagtaaactggagcgggctaatgacactatctgtgccaatgagttggaaatagagcgcctcaccatgagggtcaatgacttggttggaaccagtatgactgtcctacaggagcagcagcaaaaagaagaaaaattgagggaatctgaaaaactattagaggctctgcaggaagaaaagagagaattgaaggcagctcttcagtctcaagaaaatctcatacatgaggccagaatacaaaaggagaagttacaagaaaaagtaaaggcaactaacactcaacatgctgtagaagctataagtttggaatctgtgagtgcaacgtgtaaacagctgagccaagaactaatggaaaaatatgaagaactgaagaggatggaagcacataacaatgaatacaaagcagagattaagaagttgaaagaacagattttacagggtgaacaaagttacagttctgcactagaaggaatgaagatggaaatctcccatctaactcaggagttacatcagcgagatatcactattgcttccaccaaaggttcttcctcagacatggaaaagcgactcagagcagagatgcaaaaggcagaagacaaagcagtagagcataaggagattttggatcagctggagtcactcaaattagaaaatcgtcatctttctgaaatggtgatgaaattggaattgggtttacatgagagatggggttttaccatgttgtccagtctggttttgaacttcgggattcaagcaatccgccagcctcagcgtcccaaagtgctggaattacaagtgtgagctaccaccactggcagttaagaattttaacaatttgtcaatgaaacaagaatctcaattagagtctttatatacaatctgtactgttggaattttcaaataaatattgtaaagaaaatt

SEQ ID NO: 2411 - protein, 473 aa, Homo sapiens
MEALLEGIQNRGHGGGFLTSCEAELQELMKQIDIMVAHKKSEWEGRTHALETCLKIREQELKSLRSQLDVTHKEVGMLHQQVEEHEKIKQEMTMEYKQELKKLHEELCILKRSYEKLQKKQMREFRGNTKNHREDRSEIERLTAKIEEFRQKSLDWEKQRLIYQQQVSSLEAQRKAEQSEIIQAQLVNRKQKLESVELSSQSEIQHLSSKLERANDTICANELEIERLTMRVNDLVGTSMTVLQEQQQKEEKLRESEKLLEALQEEKRELKAALQSQENLIHEARIQKEKLQEKVKATNTQHAVEAISLESVSATCKQLSQELMEKYEELKRMEAHNNEYKAEIKKLKEQILQGEQSYSSALEGMKMEISHLTQELHQRDITIASTKGSSSDMEKRLRAEMQKAEDKAVEHKEILDQLESLKLENRHLSEMVMKLELGLHERWGFTMLSSLVLNFGIQAIRQPQRPKVLELQV

SEQ ID NO: 2412 - DNA, 2172 bp, Homo sapiens
tgggtgagttcatttgctcgcgtgcaggggaagtctggagaaggcattgtttcaattattaaaagtgtgggggcagtgggcggaacaaacgcgccgactacagaggctggacgtaagcttagcggtggcgcgcgtgcgcagcgccggcccgagttgccaaaacaaaggggatttggtgatggaggctttgttagaaggaatacaaaatcgagggcatggtgggggatttttgacatcttgtgaagcagaactacaggagctcatgaaacagattgacataatggtggctcataaaaaatctgaatgggaaggacgtacacatgctctagaaacttgcttgaaaatccgtgaacaggaacttaagagtcttaggagtcagttggatgtgacacataaggaggttggaatgttgcatcagcaggtagaagaacatgaaaaaatcaagcaagagatgaccatggaatataagcaggagttgaagaaactacatgaagaattatgcatactgaagagaagctatgaaaagcttcagaaaaagcaaatgagggaattcagaggaaataccaaaaatcacagggaagatcggtctgaaattgagaggttaactgcaaaaatagaggaattccgtcagaaatcgctggactgggagaagcaacgcttgatttatcagcaacaggtatcttcactggaggcacaaaggaaggctctggctgaacaatcagagataattcaggctcagcttgtcaatcggaaacagaaattagagtctgtggaactttctagccaatcagaaattcaacacttaagcagtaaactggagcgggctaatgacactatctgtgccaatgagttggaaatagagcgcctcaccatgagggtcaatgacttggttggaaccagtatgactgtcctacaggagcagcagcaaaaagaagaaaaattgagggaatctgaaaaactattagaggctctgcaggaagaaaagagagaattgaaggcagctcttcagtctcaagaaaatctcatacatgaggccagaatacaaaaggagaagttacaagaaaaagtaaaggcaactaacactcaacatgctgtagaagctataaggccacgggaagaatctctggcagaaaagaagtacacctctcaagggcagggggacttagacagtgtgctctcccagttgaattttacccatactagtgaggaccttctgcaggcagaggtgacttgtcttgaaggcagtttggaatctgtgagtgcaacgtgtaaacagctgagccaagaactaatggaaaaatatgaagaactgaagaggatggaagcacataacaatgaatacaaagcagagattaagaagttgaaagaacagattttacagggtgaacaaagttacagttctgcactagaaggaatgaagatggaaatctcccatctaactcaggagttacatcagcgagatatcactattgcttccaccaaaggttcttcctcagacatggaaaagcgactcagagcagagatgcaaaaggcagaagacaaagcagtagagcataaggagattttggatcagctggagtcactcaaattagaaaatcgtcatctttctgaaatggtgatgaaattggaattgggtttacatgagtgttccttgcctgtatctccccttggttcaatagctaccagatttttggaagaggaggaactgaggtctcatcacattctagagcgcttggatgcccatattgaagaactaaaaagagagagtgaaaagacagtgagacaattcacagccttaaagtagcctcttaaaaaaatcacaatcttggaaataaaaataaacaccaaagagttactgtcatctgaagtagcagctctttaaaaacatgaagagataaaattataaaaatgatacatctaaagcagtggtgaagaaagctgaaaaactgatacttttgataggcattttctctgcactggtttgtttaaaggacttcttccagcaataagttgaaagaataaaccactttgctagacttttttctcatacgaatatttattatcataaagtgatacttaccttgctgacttaaatgtgaatagctatgtactaattgaaataaggattttatgatacatgttgaaaataaagtaactgcaggaactttcttt

SEQ ID NO: 2413 - protein, 537 aa, Homo sapiens
MEALLEGIQNRGHGGGFLTSCEAELQELMKQIDIMVAHKKSEWEGRTHALETCLKIREQELKSLRSQLDVTHKEVGMLHQQVEEHEKIKQEMTMEYKQELKKLHEELCILKRSYEKLQKKQMREFRGNTKNHREDRSEIERLTAKIEEFRQKSLDWEKQRLIYQQQVSSLEAQRKAEQSEIIQAQLVNRKQKLESVELSSQSEIQHLSSKLERANDTICANELEIERLTMRVNDLVGTSMTVLQEQQQKEEKLRESEKLLEALQEEKRELKAALQSQENLIHEARIQKEKLQEKVKATNTQHAVEAIRPREESLAEKKYTSQGQGDLDSVLSQLNFTHTSEDLLQAEVTCLEGSLESVSATCKQLSQELMEKYEELKRMEAHNNEYKAEIKKLKEQILQGEQSYSSALEGMKMEISHLTQELHQRDITIASTKGSSSDMEKRLRAEMQKAEDKAVEHKEILDQLESLKLENRHLSEMVMKLELGLHECSLPVSPLGSIATRFLEEEELRSHHIRLDAHIEELKRESEKTVRQFTALK

SEQ ID NO: 2414 - DNA, 76293 bp, Mus musculus
  misc_feature (1)...(76293): n = A, C, G or T/U
agtcctatatgactggctggtcacatctttttaactgagcctcgagcttttgtctaatgcatctatgtctgtcaccccctgcttcaacagagatctctccatggtctgagtcactgaacacaaatgctggtctttgtccccagcagatgagcaaagccctttcttggtgcatccttaaagcacagcacagtagcaaccacaaataccaccaagtcacatgtagcctcccttccgacaaacccctggggtatacctctcaacacttcctggcttcccctcctacctcccgcccactgtcccggccatactgcactttcttttctcacacacacctgggctgtccacaggtgctgttggtcctttgtggtgctgttctccaatcctggaacatgctgcctgtcctgcacagagctgtctcctcccctggatgccagctttgtgactgaagtggcctttcacgtgtcccctcatcatctctcactgaatagccatccctagtgacatctcccaattccttttattacctgtgtatcaatagcctggcctcttctgagagcacacagtaggatagaccggtaggaaaactgataactattaacagtttttctagtacacagtaggtactcaaaatcaaggtagtggttgacatggggggagggggaggagcgtggagctcggttaccggagtgcttatcttaaatgcacaaatccctggtttcagtccccagcacggaaaccaggagtggtgccacagacccgtgatcccaggacccagaagctgcaatcagtagatcagaaattcaaggccgttcttggtcacacagtgagcttgaagccaacctggggatacatgagtctaaatgaacatggaggctggggggcaggatgtctgggggcaggatgtcctctgcacccctctgacactaagtcatttgtctcctccctctgcctctctctgactgggcctctctccacagcggtcctgttgacagtgtgctgcatgaggaggaagaagaagacggccaaccctgagaacaacctgagctactggaacaatgccatcacaatggactacttcaacagacacgcggtggagctcccgagggagatccagtccctagagacctcagaggtaactgccaacccccaccccccacaaccgccctgcacagaaacagcaacaacgtagcagctcagcctgaggcctgctcctctgcagagctcactggatcaggggcttccttccccctgccccagccctactgagcttggggtctgattctgaaaagagcccaccactaccaccaccaccaacccaggtgctttctgcacactggagttgggaaagctgttctcagaacttctccaatctgggaataagtaacaaatgtttatcgaggactggttttgtagcaagcagtctctggggaccgaagaggaaaacttgctctcaggagacttccaattctgagctgtggccccggagactagacgaagcctggtgtcactcaaaagcaaaccgaattaaaaatagtactagatgaggtgcagtgggcccaggggaggaagccttcccaagagcacagggattactggggcttcactcggtgtgcccacaaaggaagacagatggtccaaaggaaggggatggtccaggagagcggtgagggggagctgagttattgtgacggtgaaccctgatggtgcaggctgccttccctgttcctccattcccagggcatctagggtgagctttgatgactgtgactgtagctacattgttcccttgtccaaacccagctgatctagtcccttaaaggttttaggtgacctgtgaaggagacctgccgtagcatcttagcatcttctgctttcctatcctggtatttaccctgtgactgccagcctgatgttaactctgcatcatgctctccctacctcttgcttgccatccctactcctcacggctctttctcaggccgagagtattgagtcctgtgctgtgggacctctcatctccgagtgcccagctcagccactcacagctcctcttgtgttcccctcaggtgtatggcataactgctacaccaccctgccatatctgtctgcagctctgatgtctcccccgccctcagccacatccctacctaacagattcattgacccaacctggaaccattcattgatgccctcccggccccagtcccaagctcacctggtgtcccaggttgtgttcatgacactgctgtagtcccctgagtccacctcgcacgctctcagccagtctgttggcagattctattggttcttgctaagcatgggcttagcctactctcgtgccagtatgttgccctctcctcacgctctgatggctacattagactctggaatgatctcccattctatcatacctcctgcagtcagcccatcaggacaggagccaggtgatctctcaaaagcatgaccccattggccatggaccccagctcccaagtggatccttggggcaccataaagagaagctaaagttagatgtaggatgctatggtcccagcactggggaagtagaggtaggaagatcagaagtccaggctacttagctactttgggagtccaaggccatcttggactacatgagacccataagaaatgaaaggagggaaggaggggaaagaatggaggagagagagagaagaaaggaaggcagaggggagaaggggagaagagagagagatccccagaatccatgtaagaatccaagcataatggtacacaagctttccagtacttgggcaacagaggcagaagaattcccaggacttgctggccaaccagccttgtacaatcagctaagcccccagttcccagtgagaggacctggttcaggctgactcctaaggagcaacacctaaggttgacttctcacactacccagctcgaccgcttgcaacacacacacacacacacacacacacacacacaacacaattcctctttctggtcccttcatgagatagtcccagaccacccccacactcccctggcagctctaggctctttgctctgtacagaaagcccatcccccacaagagctttgctgttaagcttaactggacctctccccctaatgcctaggccatcacttcctactggtctctctaaggagcccttccttggctgccctcagcctcctcgacacccaccctcctcattcacccccaggcactgcagcctgctgctctcaggacacatttcttttcctctccttgctgagggcaggagccttgtgtgagttcacttctcagttccctgtatccatgggctgtgtctggcctggcccacagtgctccgcagcagacatgcagtagatgaatgagccaggaataaagaccccatgactcatcccccagttcagaggctgctacacagtagccactcagcaaaagcgtagccaaagcatagggagcaacacaggctccatgaaggtttcatggatggggaagccagcacacattcttcttctagttaagtgaaaaacgtgagaaaggcttgaatctgggtggtgaggcataaatgccttagattttctctaaaaatggggacgagaaccctgaagagcagagcccgtaaccatgctatagaaaagcccccacttgcagagcaccgtggtgttctccatgcagaaccgtggtggtaagggtcaggggtcgctcctgatctgcaatcagcaccaggccagggggctccagtaacaagggccaactagccacagtctcaagaaatgaaggcaccacaaaagccatggcagaaagccagcccagtgnnnnnnnnnnnnnnnnnnnnnnnnnnnnnnnnnnnnnnnnnnnnnnnnnnnnnnnnnnnnnnnnnnnnnnnnnnnnnnnnnnnnnnnnnnnnnnnnnnnnnnnnnnnnnnnnnnnnnnnnnnnnnnnnnnnnnnnnnnnnnnnnnnnnnnnnnnnnnnnnnnnnnnnnnnnnnnnnnnnnnnnnntgctgtgtgaggccagaatggggggcagctcagagccaggatgggaagtgccagggacatacatgccctgtagaccgcccaccccgcccaccctgcccacaggatgaccacgctgtcctatatgctgcttcctcagagccgcacttacccatccagaagcttccacatacagtgccttagaaagtctctctctgcctggcacctctactgtctgtgatgataagggtactagcagatcacggtacccagggtacctggacacttttctatttttgtttccttttcctccctccctccctctctccctccccaccccattgctgtccttgtttcccagataccttttttttttttccatgctgtgcttcatacacaccccaggttcaccattggtccatacttgctcgccccattaaaagtgggaagcaacacgagccggatttcaagctgcaaaccccacacagctcagaggaaagacttcaatctcttctccatagttagaagggtcagacttactgcactctcctgatgagatttggccaaagacaagccctcgggggaaatgcctgtctcctgaaaagacattttatcggcagggtcgtttcctctttcttccccgactatccataaagcagccagcccttccccccctcaggaactgtcctttgtctgttttgtttaaaaataaacttcagagaatgaattgtggcttcttaaaatgaaggcacttctgaggaagtcaggcccaggcctgcacacacagaggtgttgcagcgttgagttcactggcttcggagcaacctggaagtttggagatattggttgtttggcattcagtcaggcttttggcttgttctgccttttcactcaattaatacctggatctgagaagggctcttagtagcccacacgggcttgcaatccctggtagctgagcaggaaactctgtcaaactctgattcccctctgtgcggatctggggtgcctatctaaagcctttttccacctcggggcttagcagacaggctgaggatttggggggtgttgtttcacttagcacatagcttattgtggtccacatgggtgcttgtgttgcaacaagaaatgggggaatgattctcaccagactctggggggctcttaagaggaggatagactggctctgaagacttctaggcctgtcaggctctgaggggtgattataggatagctggctcctatcagtgtatctagaaaggaaaagctttgaatttgcctgggtgtctgagcaagcagcagaaagccgagtctggagtcccaggacatcaactgttgcacactaaggcaattagggataggggtatgtgtgtctgtgtctgtgtcggctgggatgggatatgtagcgtggggggaggtatgagggaatgtgatatttctgtgtgacatgtggtatgtgtgatgtatgtggttggggggaggggggcgtgtatgtacttgtgtgcttggttgcttgatttgttgaggcaatctcacactgtatatagcccaggctagcctggaactttccatccttctgactgccaagtttgtgtgactgccacccctctctccatccccagctcacaccagcttcctccctctctcctcaggaccagctctcagagccccgctccccagccaatggcgactatcgagacactgggatggtcctcgtgaaccccttctgccaggaaacactgttcgtgggaaacgaccaagtttccgagatctagatgcagcagcctccgctttgccactccctatttttgtctctaaattataaatatacaaatatatatattataaatataacctttgtgtaaccctgacttaataagagacattttcagctttttttcctaagaattgtcaacatcttttttacaagtgtggtttaaaaaaaaaaaaatttacagaatgacccatggctttataaaataaaggtatttctaagcaaagcggttgcactgattgcttctcttaactgttctgggcatgtagaggttccaggagccctgggcagatgaggaaagagaccaatctcccgtggaagctgaacgttagtgtggccaagtgagtggtcatctgcgtggtcttgatgctctggttcccaggactcagtgtgccctcatctcctgtctttttgtatgtatcctagtggtggggataggggcaccacagcggaggacacaggcaggtggtgtgcaaaacggaagggaacggtgccagcctggagcctcactgtagcatcactgaatgtcgagtttgacaggatcggtggaggccatcaagagcctccagcccccttttatgaccccacaggatgctcccaccatgctagaagaaacaggactgcctttgtctggcaggaaagtggtccctagaaactcttctcagcatcccttctaacatccctgcctgcccttggatgccctgcctctcttcctggaggacagatgcagatctcagcccttgcccttcactgttcaagtgttggttgggattcagtattgctttctccaaaggcaatgatattgtgctccatgagaaacaggtttatctattaagccttgcagtgtagaactattttttttaaccttcccccattaaatctttaaagaaaaaaataaaagattgccaaatgactcacttgaaagaagtgccattctgtctacaggcagaagcacggcagacctgcccacaaacttgccatccgctttcgctgtcccctgtcccccccaaacccccttgttcccctgggtccgggtccagctgccttccccagcccacactgtacccagcgtggccaacaaggatctctcagagacccaagaggggtttctggagccaattgcttttctctgttactttcctaacctgtcatggctagggatttaacttcaacccctccccccttctctaaaagaaaataatagtttgatagtatattttgaatatagatgttcttatcagattggagcttgaatttgtctgttgatttccatgtctgtgttgttgctgtgattttctcatcaggactgcctctcttcttccattccccttttccaaaagaaagacggccttcaaaactaatgtgtgtttctcaatgttacatggacctacttagagtctgcttgtctctcttcaaagacttcaacccacaaagaagcaggttaaatgttgtgccgagatttcgctctctaacatgttgctgtctgaccttaaccttatcataatatttctgttagctactgcgttgaatataccaatgtgtgtgagtatgtattgaagaaaacatgtttgtaaagtaaaatttatatataatatatgtcatcaaagatacatatgttatatatatatacatttgtggacgtatgacttatttttccgtatccacagaattcagctaccatgtatatataaataaacttattttattacccagaggaccaagtcgctaatacattttgcattcttttcattttaaaaaataacctttaagtctcccttcagtggtacccctaactatcttgttttcatgtatacttatctaattgaacactgtattgaactttacagtgtgatgagaaaacagggttggtgagatcttttagaacaagagggtgagtttcccaagggagagtctgctcttttcacgtctttgaaacattggtgtccatccaggtgtctccccttgcctgttcccagctccagaggactgggtagatttaaagtaaatgtctttgggtctgagagtgtctaaaaccactagtcattactatgccctgcacagtaacagtgcctagacactcatggcacctttataatcagtagcttgaaccctgcactaggccttggataatccatcccagaaccgactgaaatgcagctccatggagcccagcagtaccacctggattaggaggcagttaccataacccagccccagtgcatcatgggagctgcagaggaagaatgccaccatctgtgtaagctacagcctataactactgactggcctttacttgattcaattggctccttaatttgttaatcagataaacaacaccgatgtttaatcttgtgtcgcctgagatgtagggaggtaccttagtaaagtatcttacaatcaggatccaaattcgatccccagaacccatgtacagaacctgggtgtggcgacacttgtgtctagcactgggtaggcagagccaggcagatccctgaggctcactgacctacaagtctagcctaattggggagttccagaccaacaggggaccctgtctcaataaggtcgacagcccctgaggatggccctaaagttgatctgcggtctccacataaacacacaaaagtaacaaagtccctcttacattgtctcgagtaaacaaaacgggaggagaaatgttgcagttttcataaagaatggaaactaaaagcacacaaaattctagcagatgagcagccatgtaaccctggtgagtggtaactcccagagacaaccttatacattctggattaaagaggctttctcagctctgtacattctggccatgggatccctgggtcttttatcacaaagggaaataatagtacctatgagataatccttctgaaattgtacattatgcaccccaaacagcagtacatgtcaactgtctattttcccgagttctaaagttgaactgaaaaaaaaaatcagaaaatggaattatgctcagaattggatatactcagtacccaccagaaattgattcctgttgccttctcttgcctggagtcaactctcacattacaggatcaaggaatccaaggtccatctctggacttggggtgcatgctttcaatacactaaaacctcactcagcacatggtgttttagggctatgtcatgctcaggctgaagggaccattctagccccccaaagtgattgggatataaccattgacagtgtgacttggaagatgccaaaggccaggattaaaacctgaggtgcctactcacaaccatctgtaactcctgttccaggggatctgacaccctcacacagatatgcatgcagtcagatcaccaatgtacataaaataaaaagaaaagaaaaacctgaggtgctgaaaaaacccaaacttggagcacccctgggtactttccagaaatccctttgttgttctcccttcttggttttattaaagggtgtgacagaggtggaagggagaccagagcctaacagctgccctgcagctcaggtcctaaaacgtctgctggctgtgtcagagttagcaatcaagcagcatgtaccgcaaggtctagaggagaagaaacatggccaacggccagctgctgacaagcagagtgtcagagggcagacatgagggggaggggaggacggagctggaaggggcctggaatggctactggacctgaaggaagaaagcatgaccaggcttgctttgtttcccttgggcctgtggggctgccttcctccatggctggctcctttgtgcgcgcacacacctgcacacatgcatacacaaagagatgcggacatcctctgtaattagcccagaggcccttacacggagtcccagcttgtagtgtgagatatggatatcagaacacgtgtcatctaaggttctgtagcctgtttgctcaccagtgaagtagggacagtttgttgcctgcctggccctctctgtggtagtgacataataaaagccatggactggggttcatagtatgcatgagaccctggattctatcgcaggaattggaggcagaagaatcaaaaatttaaagtcatcctggctgcataaggattttgaggcttatctacattagagaccatttctaaaaagaaataggcaaatctagatgatccattcccacaggctgcactgctacaccccacccccacccccacccccacaccagaaaagtctggacggctgggcacatgacccagcaacagagaatgcctgtgtgcctctcacaggctggtggggcggttctcttccagctcaatgaatgcccgaagctcatggaaggcagtagacaaagaacacgggacagggaagcttccagagaggcccatgaccaggctggggctggcaaccaaaagcccctggaccctgtaaacctgccaggcaccacagaggcagagaggatgagcaagaggagagtggcagcggacttgccctcggggaccaactccagcatgcccgtgcagaggcacagggtgtcatccctcaggggaacacactctccatcctccctggatagccccccagcatccaggaccagtgctgtgggtagcctcgtccgtgcccctggggtctatgtaggagtcgcacccagtggtggcataggtggtctcggtgcccgagtgacccgccgggccctgggcatcagcagtgtctttctacagggcctgcggagttcaggccttgccaacgtgcctgctccgggcccagaaagggatcacactactgttgaggacctggggggctgcctagtggaatatatgaccaaggtgcatgctctggagcaagtcagccaggaactggaaacacaactgcgggctcacctggagagcaaggccaagagctctggaggctgggatgccctccgcgcctcctgggccagcagctaccagcaggtaagtcccccagctgtgtctagaggcttgctagaggtctgagaggggatggtgaaggtagcagcaaagatggtgggtgatcagaggccagggaagtagatctcttccataccaaaactgatggtctagtgttaacactggctgccattcactaaggctgaccaggagccaggaccccctaggcataatgcaacccccccaaaaaaaaatttccaacaatgttctgtaaccaatctctcaccacatacagttttcagatgagaaacacaaggtcccccagttcaccagctaattgagcagctgttctcaacctgtgggtctcagcccctttgggagtcacatgcagatatcctgcatatcagatgtctacattatgagtcataacagtagcaagagtacagttaggaagtagcaataattttatggctagggggtcaccacaacatgaggaactgtactaaagggtcgcagtgttaggaaggttaagaaccactatattggcaagatgcagcagatatctgaccctggattttctttcctcagagttacacttgtcctgctatctggggttgcctctgtcactttgatggttttcaagccatcaaagaacccaataccattgagtggatgtgctagtttacataactactaaataaatggaggggtgcttctatatccagataaaatgggtatacgggattgtcagggtttctattcctgcacaaacatcatgaccaagaagcaagttggggaggaaagggtttattcagcttatacttccatactgctgttcatcaccaagaaagtcaggactggaactcaagcaggccaggaagcaggagctgatgcagaggcatggagggacgttctttactggcttgcttcccctggctttctcagcctgctctcttaaccaagaccaccagcccagagatggcaccacccacaaggggacctccccccttgatcactaattgagaaaataccttacagctggatctcgtagaagcatttccccaactgaagctcctttctctgagataactccagcctgtgtcaagtgataactccagcctgtgccaagttgacacaaaactagccagtacagggatcaataggaatatggatattactagtaattttcaacttcctactacctatggtgtgtgtgcacgcgcgctcataaactagtgaagttggtgttaatatcttgcttaactcaataaggcaaaaattacttcagcatgaaatcaatatagaaataccagcacaacagccctgattcaaacagaactttttaagaggatggaaatgtcttactgtcttggccgtcggtttatgaggcttctcctgggcagacatgagcaagggcatttcaccccagacaggacactaccaacaatcaaatattttacccaagtctagcttggagaccaaagagtttttatcggggttacttgacaaactgagtataattgaatcaaaggaagctgcacccctagagctcgctgcccaatttgcaggtagctctatagaagagtctcccctctccagaaagggtttactgcatataaaatgggagcgggggtgaatcttataaagttccaagccttctaagtttcctgaagcttcctggatcttaggcacctcctctgtcctttccattcaaaccttaactacactacaccatcagtggcaactgagcccttggaatgtggccatggagactgagcacttggcattttgttttactcgggttttgttccttcagatcaccacatagaggtgacagtcatcttgctgggcagtggggtggaggcctcctttccctgtcacccagtcagggctgcttcctgttccctgaaataatttctgcagagctctacgctcatccaccaattgtgcctgcaagctctggaagcctacaagcattgtccatctcagttggtcgctctgggggtcgctggctctgcccttctttcctaaatgctggccttgggatggctaaatcagtctctaatccagctacaagtagccaaatcccatttgctccctggagtcaggcgcacaggctaagaggaggtcacgaatcgtccatgtgtggttgggtgatgccaacagaggcacacatggagtcacccatttcatcccatgatgtttcttcactgttctcagcagctctgtcctggctgatgcagctgttctgcccacactcctctgagttgtgagggagagcctcaaacatccagggccttacagccctgtacaagaggcagccattcattcctctaggagtccccacaactatcttgatttcaaatatgcatggcatattaacccctagaacatcccatattttccctcttagcagcatctgccgtgcatatgtatcaagagggaccaggcatctcaatatcaaggtcagaaagttcagctacaaaagctaatgagcagatattgcaagtggctaacaaaaacccagtgtgcagatattgggactggctcacaaaagcttctgcaatgcatgagccttagtttttcatctataatctggctttaataatgtctacataatccagcaactctatagcctatagattactataaaatactcaacagaacggccatgaagaacagacacgacttcagcttctgctcctggtggtcaaaatccaaaatggcagccattttcctctaaagtatttaccagtgaactactagataggaacagagacacccaccctccctccctccctccccattctcccccttgattttgagcctcactctgattcctcagccttaaaaccacccaaagaagaggagagattcccaggtagtggcctctgagatcaaagaggaccctatggacccctggtgcagcaggaggtggctctcaggggtccagcaggaggtggctctgtgtttccctgcgctgtgcttcggacttttcctatcaagtgggcgatgccagtaactgcctttgctagcggtatcagatccctttgtccttaacagccaaacacaagcttgcgctgagagacctcccggtacccagctgcagataaaacagcagaggagcaagcaccctgtgtagtgaatgtcagcacaaaaggagggagctgagccagggagagggagaaactgcccagggaagagatggggatgtggcagggggatactggggtctccacaggcatagggaaaaagaaatcaaaatcactgaagggccagaggatcggggttcttaatgggcttgtcatggacctattttctcttccttggaaagttggcctatcctctggaaattagtctgtttggagaaactgctagaagcctgagggtgccattcaggtcccagttctctcaccatggaagctgtgttgtctctgaaagaaggggagaggggcaggacagaaccctgggctgttttaatgtctacaaaagcctgaatatattttctgagggaaaaaaaattccgttgcttttccccccccttttcttgtttaatgtgcacgcactttatgtgtgtgtgtgttgttgttgttgttgtttatttgttgatacagggtcctggctagactggcaattactttgtagcccaggctagcctcaaacttgcagcaatcctcctgtctcagcctcccaagtgccaagattataaacttgtaataccttacttagatcgatccatttctgaaatctagtttggcaatgcagactgtgaggcagtgactctgccagctaactttgtaggacaccacagtgtggttagacagagaagcatgtactgggggaaattcctaaggacagagatgaataaaattggaatagtatttcagtaggtcaggggagggaaggaggcacaaggtcgctgcttagaggtcgtcacaaattgttatctaagaggagaaacttctagtttcctaaggtttcttgctttgtatatagagtggagctgaagagaagggcagccaaaagaaagcacacgagacaaactctgtcacccaagcccttctcatccgtccctctcagtcactcttgaatctcttatgacaccttgcactatcaggctcacgttgagcaagttgagccatggaatgaaaagcacacattgtacaaagcctggggactttgacatcaagcagtccgaaggtcaagctcagccctgccgtctgtctccggcaggaccttgaactggcttctacaatgatgtctgcctagctcagttcctcataataatgaggtgtctttggcctgattagatgtctctaatgaggctgctctagaggcccactgcagagactggaactagggaaaagatgaggactgtgcccgctacaatgtagcactggtcagagacctggcctacgcagttcgaaaagacaggtgtaagaatagaaaaagaaaaatgttggttctttctagaaaacccggagagctgaatgtaaaatcttgttatacaatcttattaaataagatttaattaaatctcaggttatagaatttcactaaaaaatgataggcatatataagcaacaacaacaacaaacaatgaatgaaattttgatttatcatgccataaaatagattgcctgtaaggaaacctaaggaatatccaaattttataataatggctcagtgcagagcacctgtctagtatgtgcaagcccctgggtttaatcctcaacaccagaaaaaggaaaaaaagaatgttttattaccaggtggtggtggtgcacacctttaatcccaacattggggaggcagagacaggcagatctctgagtctgagactagcctggtctacagagcaagtttcagaacagccggggctacacagagaaaccctgtctcaaaaaaaaaaaaaaaaaaaagttttatcttataaaatacaacagcttatttggactctagatccaagtcagagcagaggagcccactaagcctcacagaataaggagtatccaggggtctaccctataataggagaaaacgcatctcaaagatctcctctcaaagcagaagcccggcatccttatttaagagcaatgggaggagcccggtaatgtgctgcactctccagaagaactaaattaaaacttaatccaggcagctggcacagctccgagggaaaatgcagtatgcctttccggaggattatggagagaagtggctgagacaggcagaaaagtggctcagggtccccagcgtcccctgggggaatgaggcagggccactgaagctgaggactccatttaggcaaataaaacctcgttcatccttgtctgccgggaaaacagcacagaaagactcatttatctgctttaaacgagccagcctggtgatcacagatgcattattcagcagaaatgagaagttacttcagctgttagcgggaggtaatgaaaagccgcagaggactccccccccatccctttcacactgaccagctactggaaaacaatctccaatttatttatgtatgtatgtttctatttctttcaggggccgtagagtaatggtaagtcttaaggagacgctgcactgcagtgagagacgtggagttaggcaggctcgggagcccctgtacagaagacaagcttctgtctgaacactaactgcctagacatgcctgctccagcccagctgagtcctccctcccctccccttcctccccacttcctccccacttcctccagccagtcctaccaggccagagcctttctaggtaccaggccctaccttccatttcctcttcagtagcttccactctccacttcaggttaagtgccccttacccctaccccacccccacgccccatcccccaccccagtcaggggcagctctgagcaacgctaacccagcaagtagcattttattattgttcatttgccatgaaaactgaagcatcgggcatgtctctaactaaaaccttggctatttatctggataatgagtggaaactctagtgctaaaatgacttcccaggaggagacataagtaatgtctagccctcctcctacggtcaaaatgacaccacaaacgttgactttggggaactattgagtctatcaggcttccttacagagcccagaggaagggttacttactcaaatgtagaagcgttaacccagcacgaatgctgaatgctgcctttcccagagccacctagagggaggcccttcccctagtcttccttatatatattctaacttctccccaagaccataagaaattaagacaatgctgtagtcactgggtggtagggagcagccggatgcccaggtgagggtcatatgaccctccctagccctctatagtgatttttttatgcaggcagcacagctgaactcccccaagatggcggtggtttggctctgaggttagtgctatacaacagtctctgtgccccgggtatgctcactcctatcaggagtgaatcagacaagatgaggaaggacctggggcttctcaggaattcactgtgtgggttcccagaggagcctacggacacctgcctggggagtaaatctctctggtgtttctcacaaccacagttgcaaaagcagcagccagctttgggcctccagtgcagagcccaccaccatacacacacacacaggccaggccaggaaccacctccaggggaaagccttggacagactcagaattcctaagtacagtttcctatccagcccgttatgaatgtggagaacggatatatgtgttctgggggacccaggggttccccaacaatgttttctagcaaaaccaagtaccttgataagacttgtgagggtgacagccttgagtgggatcgtgactctcagggcctcgaacgcatagccccttgaatccttagcggtggatggagtctcctggagagagaggatcgccagatgctgtcagcctgaatgaaggtcttcgtctgggtggctgcagcaccaggcaatgtattctctcactctcctcaaggctccagtctaagataaagacgtcaatcagccagggcattcctccctacaggagccattggcttcctgacccctcttgcgactgcgtatgcatgtccacgtttctttttgccagggctccagtcctgcaggactagaaccagcttcatggcctcaagttagcataaccctctctttatagatcctagctccaaaaatggtcatatcctgaggtactgagcaattagaacttcaacatatggaccaaggggacataattcagatcataacctccgactgtatttatttatatttatttattagcttatcgtgatatacggttccttgaaatagggggtctcaaactcatgatactcccacgtcagcatcctaaaagctgtatcaccatgactcctaatttaaaaagaaactgaagtctagagaggaatggatattccctgttgagtttgtaatccagccaggatcgattcagtgttgttccgcccacccccaccccacctccagccaccaagagacattacaaaaagcttcctggtgccttcatgtataaatgcagagggccctaactagaaccccaccacctactatgagaaccctccgcctgttcaaatggagtggttagcctctgggaggggtctattttcctccctttcctttcctctttggtctggaaagccacttcacaaagggtagtcttaatagcgttctcacgcccggccaggaaagacgcaacaaaccagaatcttctgcggcaaaactttattgcttacatcttcaggagctaggagcgcaaaaacccccagccccaaaagcgaaagccccttctatattacatctttaggagccagagctccggcgccgccaaagcgcagagcgcgctctattgtttacatctttaggcagcgagagagcgcagggcgcgcagagccagagagatgccagcgagagagaatggcggaaaccccgtcccctttaaggaggagttattcttcgcttaggacgcatcactccctgattggctgcagcccatggccgagctgacgttcacgggaaaggtagagtacaagtagtcataaaatacccttggcacatgcgcagattatttgtttaccacttagaacacaggatgtcagcgccatcttgtgacggcgaatgtgggggcggctcccaacatcgtagattgatcttcccgcaggtacagccgcgactagagccgagggctgttactaggacaccggaggctcggacaccttccggtgcgtcaatcagctccaggctgacttgaaagtttaatagctttgcatgccaggaatggtgaggcctccctcgggattcttttttttttttttttttttttcttttgcaatgatgttcaggcttaggaaaaataacactagtaaaaatgtgccaagcagtcagctctcaaggcaggacaccttcctatgatgggagttcagaggctccatgcggtgcgtggttccgacggccccaagccactgttccttggtcctctgggcagctgcctgtgtgggagggagaggcttgtgctaagatgagcctgctgcggggctttccaaagattgctggatgggatctgtggcctctaagggtggctgcttccccaaacccggagcttcgtgtcaatctggagagctagggactctttgaaagtagggacaggtcacaccaaatgttggaaactagggaccagcccatcctgaaaggctcccagtctaagaatgagacacgggcttgttgaaagccaccaaagatggcagcagagaatcttgattatacctgcaaagaccatgtttcaaaaaaaaattcctgggattaggatgtcagtgactctttggagcactgtgcaatgtaaaccggaactaaagctattggttgtttggggggttgttgttattgttgttttgggggttttatatttgtttgttttgggggttgttttttatttaaatcttatattcctggtttctgtcctagttcttcaaataccacttcaaaagtccacaactaactaccaatattttcatctctagcctacccccccttccatttgaaatcatattctgcctcctagaaaaccattaattcacgagggcaaaccgcagtgcagacagccccaagagagagactttcaaatcacggagggacacacacagttactgtgtgacctccctgaacccttttctcaacggttaaagagagggaccagctcccctgggtctcgtagaagacacaggaaataagccagattccggttcataaccctagaaggcaagtggcagggtcttcttcgtgaggctggagggacaagttccacttgactccttctggtggctccctccctggctctgagcccattagacaaatccctttcactcagaggctcatctgtaagatcagagggcagacttcactgacctcccaagcctcatgcgacagagccatctacaaactcctgagcctcgggtagacactaagaagaagagatgccctctccccattcttagaaatttggccaggctggcaatgttctgcacctgtggtccttgcattcctaagattctgataatgacctatgcccctctgaagtgatgaaacatctgttattcacctcacatacctgccaggctatatctcaggtgttgcccgatgaacttgtctagaacaagcgttaaatgggagcagacaaagcccacacaggatcagagttcacaaaacccctgattaaattaagccaacacacagctgggattcctgggttggccagatctagcgctgtactttcgggtaggcggtaatgaatattcaagagctgtcctcatccttctatacccctgaggtggtcatttttcagcctactcaatacactaagaatgccccagtatcagaagtgtggtctggtcttccctgaattttgcaacgatagctcggtgacaggaaataagaaaggacagaaggaagacaggaaggaaagggaagaagaaagaggaagtcaggcaggaaggaagacgaggtagcagataatggggcatactgcacatcccaaaaggcctgagttcacactctggctttgcagttgacctaagacaagccccgcaaccttgacctctctggatgaaatgctgtggtccgtaaaaggacgataatattcatgccacgacatcgttgtgagacttaaataatttatttcaaatctttattgtagtgcctggccacagtaagcattcattgtaagtaatcgatgtcatcatttgtcacagttaaataataataaccatgaatgttgcatagcccttgtagcctgtctacccagccaatcccactcgttagtatctcaggcaggatctcagatagtatctgtacagtgacacatagggatgggcccaggtgtctctttgtggccagcaatccctgagtagccttcaagccaaacccagagctgaaggagaccctccatgagatgggggaaaggtgggggaggggttgggtgagtcccctggctgttgcctcttggcaagtggcgccaccttctggctgttctaggagctgtcctgcaaacctagcatttccaccccccgtgcaaaatgttccatgcgtgtcaggttctggactcctagactcaccactccatcagagccaccttgacttgggaggccaactacacaatccgtgccatgctgcagccaatctaagggtgtcagaatttccactacaggtctcaaatttcttgaggattcaaaaccaaccataaaatctcgctctgtgctgaaacgttgcgcaggaagcccaccccgtccctcctctctgccgttgctatttgggacagacgaaatccctctcctctttgagttgcgtttcgtgttgctttgcgggtttagggcagagcttgaatttagaggcagagtcccaagctctgaagcccattctacaaatcctctcccaggttcccggcgcagcccactttcatgtccggctctgaagaggaaggagataattgcggctgccatcatggcagtggtctttctgaagcttacagcgatagagcaggagggaggaaggctttgtcagtgtcagattagactaccacttcccagcctgtgtgtgtaattagtgtcacacgtaagtacagaatctttcacggtggtggcacccattggtcctgccctcttgcagcagcctggcagtgtaacatttatcacagtagctacagtggagttgtcacagactcccttttattctgttcctttctgaggctttgaatgcagactaccatgtaccaggcactgtgagcattcacatattaaagagacctagttgtgagccatggaccctggagtctaggaagaatgttgaatcaacacatccacactttggtccaggcacattacactgtcagcgcagtgctgggcatgtgactgatgtcaactgtatacagaccaggaggatcaccagaggggtggtcaaaacacatttcgatgtgataggacccctccctagatctctttcaacctactcagtggaagacagacactggcagtgacacagagagatacaagtgctgtcatggttttcctcatcactggtaaccagacatggtaacatggcacccaaatttgatagtgcatatggattttagttgtgtcaaagtcaggtaggtcaggcttgcttgtaagcactttacctccacagctatctcccaagcttggtcccaggcttataatcccagagatggggagacacaagaatacctggccagccagtctgtactaattggcgagctctgagttccaataaaaactacatatcgccgggcatggtggcgcaggcctttaatcccagcacttgggaggcagaagcaggcggatttctgagttcgaggccaacctggtctacagagtgagttccaggacagccagggctatacagagaaaccctatcttgaaaaaacaaaacaaacaaacaaacaaactacatctcagaaagaaaaaaatggagagatcctaaggagatccacttgagattgtcctccatgtacatgtatgcacctacaggcacatatatgtacatgcatgcacatacaggcacatgcatgtacatgaatgcacttacaggcacatacatgtacatgcacacaaaggatcttctctgagagtcgcacctgaatcagagaggagccctggtagtgtggatctcagcatatttctgattagcacaaatccctcaggcatgggcaaacacccaggaggaagatctcaccagaggaaagctagacataaccatttccaaacagcttcctttaggcgaacagaaaggacatctgggagactcaagcagtgtggccctgtgtccttgagtcctgacttccctgcacctgtgccttcagcagctttacccactgctcccaaggttgcagcaaactcactcgggcctcatgactgctaccctgggaacctgtcctcctgtccctgttcattcccaatggttcccacctccatgccagcacactttcccagagagtgcccctgtcttaagcactgtgaagcgctgaccactggaccagctcttttttttttttttccagttgactttgcttataccaccttgtcttttcttaactgtgaaatcttttaatagaagaagagcacccagcactcagcatgtccgccctcaaccttgtacatgacacactttatttgaagcaaaactcaaagattttagaaagaatgcaaactcctttttgcatggacaagctgcagttgcaagtcagtctatgggatgtctgctgtcagggtctaggttttcaggggatgctggtgtctcttttatctgatcatctagctgactggatgaggctcattcacattacagaaagtagtctatataattaataataataataatggactgctgcgcatattactattgttactactattaccatggtgatgctggggttgaacctggggccttgtacatgctagcttggtactctgtcaccgagctatacccccagtctattacttttcaagacagagtatcactcaaaggcccaaactgacctagaatgtgctctatagcccaggcactccttgagtttgtagtcctcctatctcggcctacagagtagctagaataagcctgtaccccatgcccaacaccatggcccatctcaattttatctaacgctaccctcagagaaccatccagaagaatgaccaaccaaacacccaggcaccagagcccagccaagtaacatccagccgttgggctcacattgttccaattttctctgtcacaagtagtggtggtggtgggggggggggggtcaagaacttcccatgtcaggaatggtgggacatgtgtttggacaaatcaggttgtttgtgtgtggaatgtgtacatggaagtcagaggtcaacatcaggagtctcccttggcaattttccaccttattttttttctgacatggtctctcattgaaaccagaactcactcagccgagcatggtggcgcacgcctttaatcccagcactagggaagcagaggcaggtggatttctgagttcgaggccagtctggtctacagagtgagttccaggacagccagggctacacagagaaaccctgtctcgaaaaaccaaaccaaaacaaaacaaaaaaacaaaacaaaacaaaactcactctctggatacattgtctgacaggtaagctccaggtctacatctctatgtccagcaattttttttaaacaggtctgagatttgaacctagatccttgtgggtacatagcaagcaccttacccactgagccatctctccagccctgtgaaattgctttttattaaaataaagcccttcccatctgtgtgttaatcatccccaactgttctcccaccaagaggggttgcgattgtgcatcacaacaacgacataacccatgaagcctgaaatatatattatcgaatcctcggtagcagaggtccatgcctaccgtggacagtatgcaaggacgctggtgcatagcattgccagatggcactaaactggcctcacacacttccttcccagagcttccagggagacctctgccttctccaccgcttctctcactactcgctgccttggtcttggcctggtctttgaaaacggatgtctccctgtctcacgggcttgactctttcaacgagtatcacttattcatcaatttactgaatacttattaagggattagcaggcacctgctactgctgagataaagctgccctgcttcataagaagagaaatggctgctatttgatgttagagccatggtttaatcacagtgggaaggcagatggccgagcgtagagcttgctggcctgccctggagcgggagcaccatgaaaaacaatcgaatagctggcggtattttgcaggcttaggatgctcagctggggagtaaaacaaggacttggccatccgcccaaagcggctgacagccaggggcacctacatcataattctcaggagaatggagctctttttcatgctggcatccataatacagtcttctggtgattaaacaggtttttttcttcttcttctgtcctgccatttgaccttagaaaataaaacatctgtgattataagagggggagagtgtgtgagaaaggtattgtccacgtttaatacaataagagatggagctactcaaaggcagtagaaaggaagggagctaacctatgccagccagccagccagcctgggagtcagagcacacagtgttggaggctggaaaccatgacatccaaagagatggaggcaagatacaggcattaaaccaaagcagaagctgctgaagagagcatcaggggagaaagtgctcaggcaggagaatgccaaattataagaccactgttgaattttaaagatcagatgtagatgcacacccactgctggtgaggtttttgtaggtatttttcctcttttggagttgtttttcttttgtttcaagacaagatctcactactgtagccctggctgaccataaacttgtgctttcctgactcggccacccaagtgctgggattacaggtgtgtacatgcctggctgtatgtggtatcttaattttaaaaactgaaatataaggacatgaaaatagcaaagattaatgaaagatatattccaggtgaggtgctcataatgacctctggaggtgaggccagaagtcgacaagagcagagaattttaaatcagacatacaatttgtaactgttgaaacctgtttgggaagtcagaattctgatctctattggtgtatcattatatacttgaagttttccgtaatatatgtttgcttttttaaaactgttgttgagaacaaaaaagagccataatgagagaccatcactgagtgagggatacaaaggtgaagaaagacaaggatgaggacaaaagacagcacaaccactgtagagatgggctgggcagcctgggctgggttttgagggatgaataggagctcacctcacaaacgaaaaagaaggcagggctagataaggcttgcctatgatgtttgcacataggagaatgaggtaagagtgggaatctggaaagttcaaacaagtcaaaaggagttctgcccctgagaagaggccaaacttagagatcagcaaggtcaagttataagaggtcttatacagcaaactaaagagggagggtttatcaggaacatacctcagaacattctagtacaacggttttcaacctgggggtcaaatggcccttttacaggggttgcatatcagatattctgcatatcagatatttacattacagttcatgacagtagcaaaattacagctatgaagtagcaaggaaaataattttatggttggtgtcagcaccagatgaggaactgtattaaaggtcacagcatcaggaaggttgagaaccactgctccagtagaagggggaggaggttggaaaacagagatggacaataagggggcggggtcagctggctatccaacagattccccaaggccactgagtctttgatgtgcccggtgctcaaaacagattcctttggaggtgtccagatggagctgtgacaagagtgattctcagtgtagactaaggtggggccccaggcatttctgagtgcaggacgcggctcttaccccagcttcggctcgccacaaaggaacgttggcagcttgtcagctcagctgacatctactgtaccaagccccacatagccaatagggcagagatgggggtttcccctgtcagtcagcaagcaggaatgacagaagcacacctgtgatcccagcatgctttaggccaaggcaggaagaatgcaagctctaggctagcctgggctacacagtaagattctatctcaaaagacaaccttggtaaagtcattacaatccattgtaaatgattcagagaaagccaacgaggcagaggtgagcagagaagaggacattctgtttgaggtgaggtggttaggatgaagaaagagccaggcagagcaggagggaagaccagtgtgatctggaaaagccagactccagagcgacgaagcctgtgaacaactggaacacagccaagcacgtagagccttaaagaccactgtctaaggctccacgctttattcccaactgtgctggctagttttatggcaacttgacacaagcttagagtcactggagaggaaggagtctcaactgagaaagtctctccataatattggtctgtaggcagaggcaggcaaatctctgtgaggctagtctggtctgaatagtgagcacctatctcaaaaagaaaataggtagatgaaaatcaaggtgggcacacaatttcatttcatttaaatccctgtggatagatgagatcgcttacagataaaaatgagccctgagagccagccctgaggaccggcagcacttagagctttgatacggagactgggccagcagagcaaaagagtagagagtagtgccgtgggagccaagaggcataagtgcatccttagtgacacagggagtggggccttagcaagatggcaggcttcagtgtgatggtgagtgagtagggtcctaggcacagattttagtttcctgtttgttgctagaagcaagtcatgccgagaatctacccttacttgaagtcacataaaagtgaagatatttccaagggaatctcatattactgtgcccactgagttaatttcccaggagcccagacttgcccagctcccccctcagcctgcatgtagttcaggctgctgagacaccagtatctttaactttaattgttgggctcacatgagaacctttttttaaatgctccttgtctttgcctcttttaaaaaacacaatcacagctcaatccctcacctgccaccaccagctccatttattttaataactgtgtccccagtgaagcagcgccaggaaaggataaggtccagaacaccagggtaagtgtgacagggttcctccaaggacagtagaaggggaaattgaaagaaaaaaataatatatctatgaagccactagatggaagtcttcattaactgcctgtgcattaaaaagaagaggaggaagaggtggaggaggtggaggaggtgaaggaggaggaagaggtggaggaagaggaaaaagaggaggaggagggagaggtggaggaggaagaagaggtggaggaggaggaagaggtgaggaggaggagaaggaagaaggaaagaagaagaggaggaagaggtggaagagaaggaggaaggaaagaagaagaggaggaagaggaagaggaggaggaagaagaaagaagaagcaagaagaagaagaagaagaagaagaagaagaagaagaagaagaagaagaagaagaagcagcagcagnnnnnnnnnnnnnnnnnnnnnnnnnnnnnnnnnnnnnnnnnnnnnnnnnnnnaagaagaagaagcagcagcagcagcagcagcagcagcagcagcagcagcagcagcagcagcaaggggccaggatgtagttcagtaatagactgcatgcctagcatgcatgagaccctcagttcaatccccagcacacacatacacacacacacacagagagagagagacacacacacacacacacagagagagagagagagagagagagagagagagagagaagaggaaggaggagtttaaaagagcaggtggagcaggagcaatggctgaatgcgcacaccaatctaattcatccgacactcattgtacagttgctttgtacaaaggcaaataacaatgataataatggccgccaggtgtgggacactcggcctgtgccaggccggctactcgaggaaggaggtgtttttcacacgtcgagtcattcagtgcgcatagctaactgttatccaagttgtaactaacacagttatcccagtgtaactgtggatgagcaaaccaaatcttggtgttacttactctgtggcgaggagaagagctgggtttgagaatagaagaggaatgtggttacccacaaggtgtctacactaagtggggatgggtgacattgatgagagggacaaggggcagcgacagcaacgttcaccccaggcttccagtaactcagcctaaaagagtgctctgtcatcgaaaagtgtctcctctgtcccctcttcccttcacccccacaaccaaccttgtcgataccaccaccctttatcattaggaggataaattccccatacaggcctaagacccttccctggtcctcagcaccctctttagtgctgcactcttccctccctcacattccacatcacacctgtaccatgttcagagtcttactacagctgccagggaagtccctgccctctctcattcgttatctctgagtccttccttccgtaggtggcctttgcttgctctttgagcctcatctcccatagtagctgctcattctccaatagcaggcacagaacctgctgccagaaaaccgtaatcatatgcagaagggacaagggcaagaatgaataaggctatacagagaaaggcatatacgaaatgaacattattgtaatgtaggatttatgagacaaccagggttgtaaggaatgacaggtgatccaggtgtcacaggcaaccacatgaacaagagtaagggcagtctagaaggagcgattgttccacaagccactgattctccaaggtgtgtgggggaggggcggggatgggaaagagggagagagagagagagagcctgtccagcaagctgcctggcacactctgagtagacagtgaatggcagccattatttgatggttgtgattcctctctacacaaaaacatttattcaacacaggagagggggtggatggttaaaacacagattcttataatgcagcttcagaaatcctgatcttacactgacgtggggtatggtcctttcccatgagctcccagggatgctggggactgcccttgaagaaccactagatcctaaagacacctccatgaggagggctagggggaaataaacctctgacagccatccctccctcaacagccatccctccctcaacagccatccctccctccacagcaacagccatcaccatgtcttctgttcctcaccagcccctcagaatttactctataacccaccgcagcctctcactgcccatctctggaatccatccaagatgtcctctagaaaagcatgtgtttctccctctgtcgctacttacaggtcccgagcctctttccctcaagaccacgcaatcccacaatcagttcttactgacattgctctgatgagccaggtttgtcagccctgtgttgctgtaacaaaatacctggataaatgactttaaatggaagaaaggcttctttttctttcacagtttgaagcctttcggtccagtcagccagcatcattgtttctgggctgtggtgaggcggaacattatggtggaagggaaagctgatgacctcaggatggccaggaagcaggaacagaggaaaggtcatggaaatacacagccccaagaacatgtcccagggggctacttccccataactaggcttccaacctcattaagtttttagaaccttccaaaatagctccaccacctgagtattgaggcataacacttaagtctgggggaggggacagtatatattcatatcaccacatactgtctccttgagtggggaacctggcattaaagcatatagttgtgacagtggcatttcaggtcagagggagagtagggggtgaggacaccccactgttagctctcccagctctccctatagcaagcttccagcctgcctgccgttcagtgttactaatgaagaccacaagtcattcatttctaccttctctccctagagagaagggccacgtggctccaaggtcacaggtagctcttcttatggatgtctcatctgtccaatggctgttcatggtgacatttggtattttcactggcttctctcctggaaagaaagttgcacagaggcaatgttaatttgtatcctcttcagctgtaaatcagtgaggaccagataattaatgtacacctctcagagcttaaaatagaaatactctttcttctcctgagaaaatgttcagcaggaaagttccctggctacaaagctcatcccccagacccatacagtcatgtggttctggaagcaaaacaagggactggggcttgaagagaaagaggattgtatcagtggggttgggctagaaatctcagaacctatgagaaagatatttatcttcatggtgcaacccaaagaggaactgagagtcttggctgtctgcatgtggagagcaaagaaaccaaggagcaaggagacagcgatccaggagggtcactaaattatgatgagccttttagcttataatacacacacatgcacaaacatacaacagaatgtgtatgcacacaaacacacacacataaacacatacatacacacatatacactcactcatgcacatgtacacatacagaaacacacatatacacacaaacacatacacacgtaaacacacacatatacaagcacaatacaatattaacattccctcaagagaatgtgcatgcacacaaacacacacatacacacacacacacacatatacaaccatacacacatacaaacacacacatacacacacacacacacacgcttttgagcacacatacacacatgctgacatggggtggcattgtggctctgtgacatttccagctctgtgacttgggacaacttcagttctctgagcaataatattctttccagtgacgtgaaggtgttgacagctttaaaccagtgccacaagcatttaatgaagttgtgaatatccagtactgatgtcaaggtggggcatatttagcatgaacaattgtctccctacaaataaatcctgtggtttatagtgtttgccaatttccctggtgcaaatactctgaccttggctgatatcaagttaccaacatctcactaatacagggctggaaagagatacagggttccataatgtagcatttccaacatccagacagagtcaaagcaggtaacttcaaaatcattacattttgaaaggggcagggactactgccttttgagtatgtactgactttgtttttaagcaactaattgtaagctcacataatttaattcttcacgatggcatgtttaaccagctcaaaactcctaaaatatttagtggttcactatctgagcccggacaagctggctcaggcattatgctgggtccaggctaagacagttaataaacacagcttctctgacctcttcccttcctagcttcagctctgggaaggcttcctgaagattttcccttacaggccccatgctttgcttttggtcaggacccctctctgggccaccataccagttctgagtctatttttgtttttttggtttttttttccaagacagggtttctctgtgtagccctgtctgtcctggaactcactttgtagaccaggctagccttgaactcagaaatccgcctgcctctgcctcccaagtgctgggattaaaggtgtgcaccaccaccgcctggcttttttttttttttttttttttctgagtctatataaaccccagcaaaggttctaaccctccttataccacataactggtcttttttggacacatctcttcctggttaggaaaggcagtggtggctactgcagggtcctctgtggtgaggaggggagactgttaatttattttaggatctctgtctgggaagacagtgggaaagcagggccagcaggctgtacgttggcaagccggagcctataatcggcccccacttgagggtggaataaatctttgattgttactaaacaccagcaaaaagcaggaaggccctctgcctcccccagccctgagcccgcacagcctcagagcacagacatttggacaaagccaccctatctgccccgcaggcactatccacattactcctgttctcagcccagaatgaaaatttaaaggccaccaagctacagggttgccagctctatctaacctctaaaatctctgtgtttctacccagtgtctttggacatagtttcaagcatcttgtattaattaatatcaggaatttgtaatagatgggaaatgtcacaaagccatatgtcctatagtgttgtggcaaggcaaaataaaattaaaaaaaaaaaaaaaaaagctttgggtctatccaaagcccagtggttctgtgtggtccgacttgaaacagccatggttccaccttctttctgcatttgtagaactgtatcctgccctctacacattttcatgcacataaacacacatgcagacaaacaaacacatgcatgcacaaatatacacatattcatacacacactcatgcagatacacacccacatatttaaacacagagacatataaacacatgcacacacaaacacacacatgcatacatatagacacacaaatacacacacaacacacacaaaatacaaacacatgcatacacaataactctttatgtgttacacaaacacatgcatacatgaaaacacacacaccaaacgtacaaaatacacacatacacatgcacttacccacagggacacatgaacacacaaacacacacatgcacacaagtacacacacacacaatacacacaaaatacaaacacacatgcatgtacaatcacatacacatacacaaatgcatacacaaagccacacaccaacctatacacaatacacacacatatgaacacttacacacacatatgaacacttacacacacatatgaacacttacacacacatatgaacacttacacacacatatgaacacttacacacacatatgaacacttacacacacatacacacacacatacacacacatatgaacacttacacacacatatgaacacttacacacacatatgaacacttacacacacatacacacacacatacacacacatatgaacacttacacacacatatgaacacttacacacacatatgaacacttacacacacatatgaacacttacacacacatatgaacacttacacacacatatgaacacttacacacacatacacacacacatatgaacacttacacacacatatgaacacttacacacacatatgaacacttacacacacatatgaacacttacacacacatacacacacacatatgaacacttacacacacatatgaacacttacacacacatatgaacacttacacacacatatgaacacttacacacacatatgaacacttacacacacatatgaacacttacacacacatacacacacacatatgaacacttacacacacatatgaacacttacacacacatatgaacacttacacacacatacacacacacatacttgacttggcttgtttcttttcctttttccttttctgttctcttaaataagctttattatataaaaatttcaaagagcttattttaagaattttgattgtcaattatctagactccatattcaaacatgagaaacactgaataaggaaaacgaaacatttaaggcctgtttgacctgcgcagtgagttcaaggcaagcctgggcaacatagtgagacctagtctcaagacagaaataaagggcctgctagatggctcagtacataaaaaatgcttgccacccaagtctgaccacatgaccttgaacctcagagcccacatgaaaaaaatcccaggaacacttacaaactcctttcttaatggcttattggaaacaacctccagaccagagccagggaatggctaagaactattaccatggccacatggttcatttattcatgcatgcatgcatcaaatatttaagagtgtcagccagcctggacacggtggtgcatgcctgtaatcccagcactcaggcagaggtgggaggattgcagaaagttccgggccagcctggtctacatagtgagttccaggccagtctggactgcgtactgagaccctgtcttacaaaaagtcaagaatggcagcctggggcacagacctgtagtcccagctacttgggatcccagggcagggcaccggcaatgtcaaggtcttcctaggacacggaatgaattcaggaaaagcctatacgacttaggggaccctgcctcgaaatagaatgtacaaaagaactggcaaagatattcagtggtagagcctttacctggctggcataagactacagagtccatcttcagctgaaaagaaaatgtataagccccaatctggctgtggaggcacatgaatagacaagaagctggggaagggggtgggggcatcctaaaaccataggtgaaaagaaggtgggctgaggagagaaagcatcccccttttaagatttatttagatgtgtgtgtgtgtgtgtgtgtatgtgtgtgtgtgcgtgcacatgctccacatgggctcaggacccaaggaggctagaagaaggcatcagttatcctagagctggagttacatgcagttgtgagacactggattgctgggaacagatctcaggtccactggaagaaccacaaacgctcgcccccccccattatgtatttatttattcatttattcatttattcattcattcattcactttacaacctgatcacagcccccctcctccagtccccccacatacggcccctcccctgtatcctcctcttctcctctgagaagggagaggtcccccaactaaggccagaccgccctgaatgtgcttgatctccacagctaagaaggatctggccttgttagtactcagatgggaggccacattcactcaactgccagaccctctctccagttcacagagttccatttgtggaagaaacaataattaggctccctcgtccctatagaccgtctggtttagtttcacttcattgaatttcccactagcaaggagcacattttctcgtctggagcctggcacaccagcaaatagatgaagaagattgtcctccttgcccatgtcttttttgtctaatcttattcctgtctttctccccttaataaggaactagagactgtgtggccagggatgcataaatgaaacttatatgcccagtagtttgtatatttagctaaatcatagggtggtttgctcagttttcagtttcgtgggattttggattttagggggacgggtattgtgggttttgtttttgtttgtttgtttggttggtttttggtttttcgagacagggtttctctatatagccctggctgtcctggaactcactctgtagaccaagctggcctcgaactcagaaatctgcctgcctctgcctcccgagtgctgggattaaaggtgtgtgccaccacacccggtttttttgtttgtttgtttgttttttgatgggttttgttttttgaggaacctctatatggtgttccataatggctgcatgaattcaccttgcacaatgggtgtatggtccctccccactcttgccagaatttgttatcttttatcttcttgataacacaaaccttactggtaggaggtgatgtcttgcggtggttttaatttgcattgccctgatgatcagtgatactgagcaagctaattagcttgatagaatcattccacaatgtaaagcatatattaaaacctcaggctgtactctgtaaatacgtaactattgccaactaaaaatgaaaattcctggctaggtgcagccccaggacttatgggatggagattgtgagtttggggttagcctgcactatacagcaagatcctgtcctataaataaataaatagtcttttaaatgtattatttttatgcgtataagtgctctgtctacatacatgcctgtctattttttttttcatgtccagtgcttacagaggccagaagaagatctcaaattccctaaactagagttagcgactgctgttagccaccatgtgggtgctagaaatcagaccctgatcctcggaagagcagccagggcttttaactgctctctccagttccattaacaactattcccaaaaataactttgggccatatgtatacatgtatatattatatatgagtgcatacatatgcttgagcgcgtacacacacatgcacacacacacacacacacacacacacacatacaccagagccctttctatcctgacttgagagctcaagactttgtcagaggctgtgaactagtctccttttgagtcaccattttatcccaaaactcttattctattttttttctattttttgtttgtttgtttgttttttgagacagggtttctctgtatagccctggctgtcctagaactcactttgtagaccaggctggcctcaaactcagaaatccgcctgcctctgcctcccgagtgctgggattaaaagcgtgcaccaccacacccggccccaaaactcttattctaaacttcactcaaaaagtctcaaagacacctagatttatgcttttttttttttttttacctcctccttgccttcaaagggggagacccattctgaaaagacaagcatttgtgaagtttcaccacattctccagcgctctgggtctcgcatgagccactacgctaaacgccctcttctctttgctccaggtgggagaggctgtcctagaaaacgcccggctcctgctgcagatggagacgatccaggccggtgcggatgactttaaagagaggtaaagctagatagcaagaggatctccctccctgacccagactccagaccacggtagataatgctgccccagagtacacaacagtccctaccgccatggtgggaaaaatggcctgagaccacagaaactctaggagaacccagtacctcaaaaatcaggtcgtaggggctcaaagactgcccagggccactcactttagaaaagtatttatttatttatttatttatttatttatttatttatttatttaatgtatatgggtacactgtcactcttttcagacaccagaagagggcatcagatcccactgcagatggtcctgagccaccatgtggttgctaggatttgaactcaggacctctggaagagcagtcagtgctcttaactactgagccatctctccacctctcccccttttaaagaaaaattactctgtgtttgtatgtgtgcgtgtgtgtgtgtgtgtgtgtgtgtgtgtgtgtgtgtatttgccatggcatacatggaaggaatacaacatgtaagagttggttctcttcttctgcctcatagtttccagggactaaactcaggtcctcaggcttggcagcaagcatctttactaaagcatctcaccagctcttctctggagtggtttggtttgattcagttccttctttgttttgttgttgttgttgttgttgttgttgttgttgttgttgttgtttgagataaggtctctaggagctcagggtgaccttgaactcactagtagccaagggtaaccatgaattacagatccttctccctccaacttccaagtgtcacaactacaggcatgatcctgataatacttggcttgagacaggattttactgtgctgaccactgttgctggaatttccaaccccaaaaagcccttcttaaaaaccacacaattcagttattataatcataagctatatgcctagattgggcagatctaacactgtcctgtcttattccccagcagtgagaccttatgctacttgcagtttctcctggccacatggttctgctccatcatggctccctcctcttctctcagcctctctcctcccttccagttcttcttcctcacgcctcaaaacctctcatcccacctttcacctcccttgcccaatcatagactctagtctttatttgaccagttagaatggggagaaggttcacattagatcacctgaacgtaagatgggctgctgctctagaggggcttccctcttgaggaagcagaattaacatcagaatacaaacagcatcagggcaaaccacagcagaccagatcatccctggacctctcactctacagaatttgcaggactcctagagacttgactttggtatttccagggtcaaacttacctttctacaggactagaggctgaagcttttacacaaagaaatgagcaatgcttagagctttgcaccaatagaccatcagccttgacaggatatgagtagcccagccctgggaacatacaagcagatgctccaacaaaatcacctgtcccaaaagccatcaaagaactgtccctaggaattctgaatgttaaagtccagtacaagagttgggcaaaggtggggagacagtgcttgttccatggtgtatcccatccccagtaccctgtcccccctgaaacacacacacacacacacacacacacacacacacacacacacacacaagcacacacacatttttaagtgaagacttacacctctaaaacctgcctgaaggctgcctggaatagagatgtgggttttgtcttcctatggacacgtggatgtgagatgggaatgctggctgaacggtgcagccatggaatgagagtagaccaggagaaattagcaaagatgtcaggtggtgaaaggaaataaaacttgagacctgtgattcatgtaatttatgtcaaatagcccaaagagttgtttgtgagctttgaaacctggggctgagaacatagcagaacaggccaggacatgcccgggcaggcccttcgttacatgtcctgacaggcctggtgcctccctatctcctgcccttctgacagtctgttgatgtttaaatggaccaatcatgtgaaaccgcgccgattcctcccccagccccaccccttttttataaaagtccctagcttccaagcctcggggtcgaaactactgtctcctgcgtgagatacttttcgacccagagctccaccattatggctccaccatgtggtcgacacctctgtctcctgcaggagatatgtgtcggccaggagctccgtcattaaactacctcatgcttttacatcaagatggtcatctgttcgtgattcttgggtgcacgccgaacgggaattgagtggggggtttccccacacagttctttcagtggtagttagagagaagggctaacagttgaaactccagtttcattatgtgcacagactcactatttaacaagctgtttgccctttgttgttttgtctatttgactgtgtgatagataaatccatgtttcctaccaccctgcccaccccccaagagagctgagccaagatggaagcacctctctgtacaatagatacgggcggagctgggcagcagtggtgaagtatgtgctctggtagagttcatctctacctctctctgtgccaacttcttgccttggtttttcctttaccctacccacctgagtatgtagccactgtctagaattgcagcatattatccatttctggataccctgcctgatacctcagtaggtcttcaatgatccttggatgataaggactctcagtatagtgacaaagatgtcgtattgcctttctgagatgggaactcctgaatcagccttccctagagtatctatcaggctccaaaggcctcccaaagctgtgttcccattagctggctgctgatgttttcctgttaatttttctgcagcaatagcagtaacggggtccccaaagctactggaacactggctttcagcattcgctgcctattacatgtgggcctttgggtaatatctaacaatctggtttgtttcccctttgggcactctacccagctacgctgattaagtccctttgtctgcagatatgaaaacgagcagccattcaggaaggcagcggaagaggaagtaagttccctgtacaaagtcatcgatgaagctaatttgacaaagacggatctggagcatcaaatagaaagcctgaaagaagaactgggctttctgtcaagaagctatgaagaggtaggtggggctgggggtgctgcctgctcccaccccaaaagcaaggcactcacccgggaggctgtaaccttgtaacacaggtcttggggactcttcactggggctcaaccaggtctacagagaaaatgctagtaaaagaccttaaagtctttgtcatgtgccactgtatcccctcaccccccaaagtctcaaactcaagtgtctttgaggcccaggaaggttgataaaagtggaagcaacagttgtaagcagacgtgactgttagaaatagttgaaactggagggaccatctccctaaagtgttctattttagatatttttttcaacactgcatgaacaggatcaactgaataattctaaagataggcgcacgggtggttcctacacactcgttaacaaaagaaggttgtatctttaagtgacaggaccaaagggcacctctagcagggatgtggtcacgtcacctgcaggaaaccaccacacacacacatcactctgattcatggttgagggtgcttcaagctgacagtcacagctcactgcccgtgttcacattgcggagttcctcctgtgcccaaacctgaagctgaccaatggctggaaacctgttccttcctgttcttggctcagttcctgacagcacactccagcagccaccccttagactctagaacggattttaatctcctttagtacatcctgatgttatgcctaacttccattttctatagatgcttgctataggttactatactatgtacttacttttgattatgtttttagtttttgttttttttttaacttgggcatgggcttgggaggatctaatctaagaaatgcatccttggggaaagaaaaatgatacctatacctagaagatctgggactttgccagtctttgtggtgcccatgcatggtgcaagatagatagatagatagatagatagatagatagatagatagatagatagatagatagatagatagataagcaggcctgccaagcaatgcccacagagccagcctgtttttcctccctagaggaaagacaggtgtcctaaggtgtccactgttgcttttaggatgtgaaggttctgtacaaacagctggcagggtctgagctggagcaagcagatgtccccatgggcaccggtctggatgatgtccttgagacgatccgagttcagtgggagagagatgtggaaaagaaccgagcagaagcaggagccttgctccaagctaaggtaagagaccagccaggatcgccccctgcgtcctgggaaggaggaggccgagcaaggtggagtcagccagcatgtaaaagaaatgcagccatttagcaacaagctcagccccccatggaaagaggagaagtgcaaagtaagataataatgcttgtttgcctctctgaaataagaaaatgtttaagatggcaatgttcaattctggaaaacatatgtaaaagattctctactgtgtcatcaaagagtataaggtgtaagtttttatccagccttcgagtaaaggatgttattgtctgtatcaaaggtgtttgtagggtcctacctgctgcctgtacgctactgtgctgctagctgagcaatctggacagccatgttaaagagcacattaggaatgcaaagggttgtgatgtagctcagggattgtgtgtgagtgtgtgtgtgtgtgtgtgtgtgtgtgtgagagagagagagagagagagagagagagagagagagagagagagagagagaggtgtccaaacatgctccatgaagcattttaagggttgaattataaggtggtaaaaatacatgtcttatcaaaagaaaaaaactacaccgttacctaactacgttgtgtgcaatgaaacctgttattagaaatgaagtaattataacaacacggggaaagcccatggaatgtaaaatggaagaaaagcaattgcagaatgatatataccggggactgacaagaaggttttgttcaacagtgagtactttagactcgcctgggaagccagatgatttctgttgcagtctctcagctttgcccctgtagcgtaacagcagccagacacagtatacagccgcaagcattctgtgttccaataagacatgtttttaatccaaacacttgggagactgaggcaaatgaatatctgtgagttcaaggccagcctcttctatatagctacttataagaccaatctcaaaaaaaaaccaattatcgaaacagcaagtgaactggacttggcctctcggctgttgccatctcccacgacagacagtggaatagaacactgttctcaaggggagaccaggtgtctccaaaaattaggctcacatggtagctgcagcagcagtgggctgcctttgaataggtggcttatctgatacttcatggtgtttttctttcttttgagtattgctcaagttaatttcctaagtagcctgaattatattaatgagaaaaaagagtcaagtagtatgagatgtaacaaataagaaaagaattatctaaaaactagaccgtagacagtttgtccttcaggtctgcccctgctcttcactcggggacttggaagagagaggaaggaccatgtaacggaactgaaaaaacaaggtgagcttgttcaaaagaggctgagttaatgactttcaacacccactgcccagcagaatcatctcagaaactgtaacggccaggatccactccagaacaacttagaagcagcagaaagacttgatgggtttcttttttaattattaataataaaagttctcagggctgaagtgagggctcagtggttaagagcacacactgctcttcctgaggacctgagttcagttcccagcacccatgtcagacagatcacgcctgccatccacctgtagctgctgctccaggagatgcagtaccctcctctggattctgatgcacccacaagctcaagtgcacacacacacacacacacacacacacacacagaacaaaataagtcttttttttttttaaagttctgtgacttctatttccctgatgactaaggatgttgaacatctaagtgcttcccagccattcaggattcccgttgagaattctctgcttagttctgtgtcccatttttcaattgggttacttgatttgttgatgtctaattccttgagttctttatatcttttagatatcagtcctctgttggatgtagggtcggtgaaaatcttttcccattctgtaggctgctgttttgtcctattgatggtgtccttagccttgcaaaaccttttcagtttcgtgaggttccatttcttgttgatcttagcgcctgaactattggtgttctgcccagtaatttgtctcctgtgccaatgtgttcaaggcattttctcactttctcttctatttgatttagtgtgtctggttttctgttgaggtctttgatccacttagacccgagttttgtgcagggtgatagatatgggtctatttgcattcttctacatgcagacatccagttagaccagcaccatttagggaagacattctcccttttccattgtatggttttagcttctttgttaaattgtccatagttgtgtgggtttatttctgggtcttcaattttattccactgatcaacatatttttatgccaataccttatggattttattactattgctctgtagtacagcttggaatcaggggtggtgatgcctccagaagttcttggattgtacaggattgttttaactatccttgttttgttttaatatgaagttgagagttgctctttaaaggtccgtaaagaattgtgttggaatttttatgggaattgcattgaatttgtagattgcttttggtaagatggccatttttactatgttaactctacctatccatggagagagcatgggagagctttctatcttctgatatcttcctcaatttctttctttagcaacttgaatttttttgtttgtttgttttgtttttcaagacagggtttctctgtatagccctggccatcctggaactcactttgtagaccaggctcacctcaaactcagaaatccgcctgcctctgcctcccaagtgctgggattaaaggcatgcaccaccaccgcctggctgaaattcttgttatataggcctttcacttgcttggttagagttccatcaaaatatttcatattatttgtggctattgtaaagttctcctcccaataattccgacctttcttcagccttgaggattggtcataaaagctgccataagacaaaagaaggacgacaccctccccctcagcatttgcctctccctgctcctccatcaactttcgggaccatcccagaaggaccttccccaattctgtatccctcaaatagtcactcctacccacccctatttctccaaccctattccccacccccaccctatctgctggagatataactccataaggcaacgtgaaatcaaaccgtggacctgagtttgctcttttaaaagagatttatgaatattttatgaccctggggaccatctaataccagtccctcgagtacctagttatatgtaagagctgagaaaactgaggtccagagcgtgcaagggactccccaaggtcactcggctgattggtagcaccaggctcaactcttctggatcctaatccaagaaccttccttctatagcatcaacatcttcttcttcctcttcctcttccttctcttctccctcctccccctttcttccctccttcccttctttaagttttcgaggcagggtctcctatgccacaagctaagctcaaattctctatgtagccaatgatgaccctgaactctttagtatttatttaacgtatatgtgtgtgcacctgagtgtatgtatgttcaccacatgcatgcagtgccagggaacatcagaagagggcgccagattccctaaaactggaattataggcaattgtgagctacctcatgggtactgagaataaaacccaggtcttctacaagagcagtgagcactcatagccaccgagccatctctccagttacagactagaactcttgacgctcctgcttcaacctctaaagtgctaggattacaggtgtttagcaccacacccaccttgtccatttgcttgagataggttctccctgtgtagcctaggccacacctgatcttcccatcctcttgcttcagcttcccatatgctaagattgcaggcatgccatgagaactcagcccacagcatcaactaagcagggctcatatgggctcagagagacagaagcagcagttacagagcttccgtgggtctgagcgaggtcctctgtatatacatgatagttgtgtggctgagtgtcttcgtgggagtcctaacagtgggagtggggctatctctgacacttagtcttgctcttgggacccttttcctcttaccgggtcgcctcatccagccttggtataagggtttgtgcttacgctcattgtaacctattatgccatgtttggttgatatccctgggaggcctgctcttgttttgaagggaaaccagaaggagtggatctggggaagagtaaaggaagggaaactagtcaggatgtaatgtatgggagaaaaaaaaatgtaaaaagaaagaaagaaaataaagttagttaccactgtgaaaggagataatgagaaaaaaaagattacaggtgtgcacagtcacgcctggctggctgtgtctttcccagctccgttgccaaagctaactaaacccagtttgccgcctgatttccctccaagcactgctgaggctcacaccacactgagcgggtgcctctttaagaatggactgggtcattatcattatcagaaataaatcctgcctagcgtgaaaatttaaaaacccacaaaactggccattatctttcagccctcatctgagaatggccgtcggctcaacactaactcaaacattaattctgaacagattcattagtgtttttaatagagtgatctgaaggccacctctcatggaagacagacaggatttgttttcatttggccagcactgcctgggcctcttgcagcgacgcagaactcagaaaatatttgcagaacgagtgaattcctctgattgtcaacagggatcagaactgacagccaggattcctgcaataaatagcttgtcggctgtggctgtgccctcgggggctgacatttgcctgccccgagcttctcatgtctgctacttggcagcaaagccaaactcaatggctcctcactgcttccaaaggcctttggaaagggaaggaaaacatgcatttaattacctttcggcccaaggaggctgaaaattaattaacgtgattaatttatgtcttagttgatgttcccccagaagcagatcttgagataaatattggagtggtggtgatttatttgggattagtgggtgagtcaggggcgggagaaccaacaaaggctgtcttatgagcagctgagattggagcagcttagggggatgctgagaaacgatggatgcagagtacggaaggaaggaggcaaggggcagggacatgaatacttcagctacctgatagccaggtgaccttttccaggacttcagagcaacctcaagcacagaggcagaggcagcagtggggagccaggaacactaaacattgaaggcacgagggataaagacacgtgggtgagcatctgttgcaactattgccagctctttctggtgtgtgtgtgtgtgtgtgtgtacaagtttgtgtgtatatacaggtaggtgtatatacaggtaggtgtgtgtgtgtgtgtgtgtctgtatacaagtgtgtgtgtatatacaggtatgtgtatgttcaggtaggtgtgtgtgtatatacaggtatgtgtatgttcaggtaggggtgtggtggtgtgtgtgtgtgtgtgtgtgtgtgtctgtatacaagtttgtgtgtatatacaggtaggtgtatgtacaggtaggtgtgtgtgtgtttgtatacaagtgtgtgtgtatatacaggtatgtgtatgttcaggtaggtgttatgtgtgtgtgtctgtatacaagtttgtgtgtatatacaggtaggtgtatgtacaggtaggtgtgtgtgtatatacaggcatgtgtatgttcaggtaggtgtgtgtatgtgtgtctgtatacaagtttgtgtgtatatacaggtaggtatatgttcaggtagatgtgtgtgtgtgtaaggtggtttggggggggatgccaaaggactcgatcagctatctgagaaatgtcacctacctcgttttttcaaaacagtttctcattggcttggaattcaccaattagactacactggcagtccagcaaaccccagaaatccccctgcctccgcctccctagcacagggatttcaagtgtataccacctcaccaggattcctggctttgtttatttgtttttaacatgggatgtggggatcaaagtcgtcatactctctgcccagtccttttaccgatagaccgagctatcaccgcagcctcttcctttgtttgtagaagccctctgaaaccagaagcaaaatccacctttccccctaagtgggtcacatcaggcatgtccttgcagtgatgcaaccatcctgagtacagacacccctattttcagtttggaattgcaatgagcagcagaggctggttttaagaaacaaggacagcttgcacaagagacagaaagtgaaccagtcacttcaacatcacccaattaacgttagactgtttgaagatttggcagcgatatgactaatcttgatttctcacagtgagacgagcagctgagcttcacctctgtggtgggatttctagcacaattgactctgtttttattttatcccctggtatgccgaggccttccaaaggaacttgtttgaaaacaatcacctgaaatattttcacctttttaaaatcttattctcatctaattatgtcttattcattgggccaggttcttactatgtatcccaggctggcatctaactcacaatcctcctgcctttgcctcccaagttcttggattataggtgtatgtcaccacaccaacacacacacacacacacacacatatatatatatatatatatatatatatatatatatacatatacatacatacacacacacacacacacacacacacacacatatatatatatatacacacaccaagtgtctacatctcttccacactgagaaattcttcaaatagcaaacatgtgtcctcccattcagtttgagtctgtctggcattgtgtacctgaggtcatcgccagatcctataggttaagaactcagtcccacaaggttgcccttgacttcagatgacaaccaaggctgaccaccctacttctgacctaccatcagtacttggagttttccataatctgctcctcagattccgttaactgctaggatagctcatagaacgcaaggaagccacacccttcttcttgttggttctcaataacaaacacaatttaaagcagtccagtgggggagatacctgcagtcagatgtgtaatggagctacagaactgtgtcctctccaggagccccacctaccccatccctccactgcctaccagcctggaacttctctggatgttgcatggccctctgtggttcaagcttccttcattctagacacaactgattaaatcatcattagcattgattcactgcctctcccctccctgagtcaggaaaagggctgaaaactctagcttctaatcactggagaggggcaggcaccaacccccacactccttaaggtcttgccaaagacatctcttgaacataaacttgggtgtttgggtgttgttgaaagatgtttgtgttatcaatgagagaaaaacacactttttttttcccccaccatggagctatttaaggatcccagaaacaaaaactacccatagctgagaacactacttcagctctcatcagctaggaagttgccagggttttaagagctctggctgggagccagagataaagaccaaaagtataaaatatgtttcattatgtcactattacacaatggagtacattctccaacctgccggccaactgaccttaacaaagaccacctcggtcaatccccaaagtccctgttattgtccccgagctcctaaacagatcaggaagcagagagctcacccaggagcagggaccctcccccacctcctcctaaaggacccataactggggaccaagcgttcaaacacacatgttcgtgcaacattttcacattcagaccacaggaatgcccattttatggatgtatttcatggaaagaatgggagaggtggtggggaggagggaagagaaggaggagggagagtcttgggtctccctaactccgtgggagtttatatgatagaatgtaaacatctctatggtggcctttgaccaacagaaaacggtgttctggagccacatcagagaacatcactgttttgctaatttgtgggtttttctttttcccaccctttatcctccctggtttcatcccctatcacttgataggagagaaagaaggatagagagagaaagggaaggtaggaggggagagagagaaagagagagaggaagggagaaatccctaaatctagtttctttccttttgtttcttctgtgagcaagactactaacaaactacatccaaactccctgaatgtccaaccaccaactccaagcttggagcactagcacttttacaccctctgaaaagttcccagaattccaaacatcacacaactgcagaaactgtctgcagctggcaaaaatgtctatgctagaccacgaggcaaatcacggtcagctgctggctgccaaggaccatccgaagcatcctcgcatccctacacctgagattaaaacaaaaacacatttttttttttcgagacagagtttctctgtgtagtcctggctgtcctggaactcactctatagaccaggctggtcttgaactcagaaatccacctgcctctgcctcccaagtgctgggattaaaggtgtgcaccaccacttcccagccaaaaacatattcttatatttctaggttttgggttctggtttttttttttttttaagaaaacaaaattcgagaattctctaaaatgtcactacaccgggcagcccaaaagatacttccaaaggtattctgttttggtggggctagagagactgctcagtggttaaaagcaacggctgcccttgtaggcagttcagttcccagcactggtgtggcagctcacaactataactcaagttgcaacaggccaaataccctcttctggcctccaagggtaccgagcatgcatgtggtacacagacatcggggaaaaacactcacacctaaaatagttaacaaaagatccagtgcgctcataaaccaacagaacaacaacatgcatgttagacctttggtctgattaaatcaattctatgccaatgctattaacttttgatgaacttttcccaacttggaggcagaaggacaccttcaaaagctgtttattcttgttctataacacagcctggtcatgagctgatctcagagggcaaaggcaggggaggcctggacccccttccacatcactaccaccaaagcagagaccatcatctgcctcttatgtgttggccttcagccacctttcctgggggaatgagaggccctctcttctatgtccacagtcccagcctaggtgtgggtaagcctttgcttccttaccctaggctaggggttcagtcatcttctggccagccagctctgttatgccatcctctctttctccctgtggtggtccctctgcccaaaacccatgccacctcctgaagtcttagtccattcccgctactccaagctagtagccgagagagagagagagagagagagagagagagagagagagagagagagactgactttgtcttagagcttcaactcctcaacagccagatactgtgctgtgctcagacaggaaatccacacctgcctcggggcagtttgaggcatctgtggtcaagagctttctctgagctgcagccatcaggcctctaacagtcaggatgatgggccggacgcactattaaaaatgaagaggtgggtagcttgaaacaaatgatgagggtttccaggtgacagtctctcaaagctgtgagactgtagagtggaacgagaatttacattcctgacaaaaatacatctgagaggacccctgtccccacatcctcactgacgctgtgcgcccagtgtttgcggtaagaattcttcagtgtacctcttaggtgcattgcttgtagtttgaggatgcagacctccttttgatatgctggatctcatgaagatttgcttccatgtttagcgccagatcatgccttttgtcatcttcatgtatgtcctcgactttttagttttgcggtggctctttttatagcatatgaatcagttctgtcaaccaggcatggtggtgcatacctgtcagcacttcactcaggaggttgggacaggaggttcactgcaagttcaaggccagactgggctgtagagcttgctttaaaagaagatcaggatagatcaatcatgtttctgagacgtaaggtgtgtgtgtgtgtgtgtgtgtgtgtgtgtgtgtgtgtgtgttccagcccagggttcccataacatgctacatttgtgactctgctgggtcaggggagataatcagagtagcttcatgttggcctttgattctttactgaagaaaatagacattaaaaggccacccttagggcatcttacccattctcaagccctcaagtgtcagtcaccagcagttgaatggctggatcctttctcactgtccagtaaaggatcctcacccacccctgcacttagaggctatgggcggagctcaagccagctgtgaagcttcggttggtacttcaaacacagagtctccatctcagaaggatgcttttccctggcttcctgatttgcctgacctcagagcatctcgtagatactttttgattggctgttcccataaaaggtataaagatactacttctaaaacaggagattgtcaaagatgaaacaacccaaatcatccctgggggattaaggtactgtcattcatactccacacatagccgtctcctaggagacaagcaaacaagtcccttaagaggaggatgatcataataagcaaagacaaaaatactataatttagacttatccaataattaagaaaaatctatttttagcccatgggtgagtttcttctcttgcttttagcatacagtatgttcaattccatcccagatgtgagctggggcagcaagtccttgaggccattagctgtttcttttggcagataccacacaatctgggaattggtggctctgttccatcccagagaacagcttgagaagccaggcggctcttgtgtccactcaaggagccatgagaccctgactaaccaggccggtattccactcacagtgaagcttcactgagagtcacgctacttttaaatacacccccgaggaagccctatgtcagtgaggcaggctgaacggtatccagacttctcccaaataaatcttgcattgggcagcagggaggagggctaagtcagggatgcatagcatagcctgcctgctaaaagctctctgctgccaaatagcatgtggcaccaaagacaccaaagtggtttataaggcttaatagcatagtagttaatcttcctaataaagacaagatctggtctagtccggttcacaggagaccctcttcttcctcgagtccccggcatgtcctgggcccatgttgttgaccttcttcaatgaaggatgttggggatgccctaggtgtgaagagccattaagctacccagaaggaataaggagtcgtcactgcacacccaattcctatgatctagagaggaggttgctgggtgggatgcaggagtagacagaaaggcccccaccccaaatggcaggatgacacttgccaggaatactctgaagcagagcattgcctgagtgacaggggacagtgccatgtgacaggggacagtgccatgtgacaggggacagccatacatttgccagataagctcgcagtgcatccagataggagttctgattttcatccattactgaataaactgaggcacagagtagacaggaaacttgcctcagcccagccatgtagaaagcggcagagctgtagtctgcgggcaggctcagcactctttattggttcttttctgttcttattttgaggcagagtcccctgcagcccaggctggccttggacagtctacggtacccagggtacccttgaactccttcctgtccctccggcttccatccccacgtgctgggattacagattggtgccaccacaccccagtcaggattaacactcaactgctaggctcagagggacagaaagatcacatagatgggagactgcaattcactatcttaagaatgagcaagaaacatcttaaaggctgtgaggatggagagtctgtgcagatatgtggggctgctgtcgggatctttctagggcagtggttcccaaccttcctaatgctgtgaccctttaacactatgcctcatgccatggtgacccccccaaccaaaaatttatttccattgctgcttcataactgtaattttgctactgttataaatcgtagtttaaatatctgtgttttccaatggtcttaggtgacccctatgaaaaagtccttcaacccccaaagaggtcgtgactcacaggctgaaaactgctgttctaaagcagtgtgccccccaccccagatcaggagcccttgtgaccccagaagcagtgaattgctttgctccatgacaaagaacacaatgcagtcatggtcatgttcttgtgaagtctggaaagcacacctgtgctcttgcaaggctgtcgctcacctcgaggtcaaagcagagagcttgcatgactctcaaccccacagcaagtgcttggggagagacagacacacatacaccctgagatcccgaagcctgggtgcacaagctttcagagcactgaccatttctgacatcagagcatgtcactggtggcttgctatgccctcctttcccctaggagcccatttcagtcctcaccctgcagctttaagtcataggcaatgctgcttgtgagacagccaatgatgatcctaaaagtgatcagctttagaaaaaaatgtcctcgttcttcctttattttcccccaatagttcatcccctaagtaactaattatgattataataggcgtgtgcttatgtacacactcatgcatgcatgtatgcatgtgtatatgtgtgtgtgtgtgtgtaggtgtgagtgcatatggggaggccagaggtcaatgttggtagcttcctcagttgctctctaccttatctttgatatagggtctctcactgattagccaaggtgcatgtgtgtgcgtgcgtgtgtgtgtgtgtgtgtgtgtgtgtgtgtgtgtgttgagtcttttgagacagggtctcactatgtacacctgactaagctagaactcactgcatagaccaggctggcctcaaattcaaagcctgcctctgaatcacacgtgcttgggatgagagtagagatatatgtcactacacccagctatatttttttaagatttttaaaatatttttgtttgtttgtttgtttgtttgtttttgtttttcgagacagggtttctctgtatagccctggctgtcctggaactcattttgtagaccaggctggccttgaactcagaaattcgcctgcctctgcctcccaagtgctgggattaaaggcgtgcgccaccacgccctgcttttttttatatttttattttatgtgtgtgtgtgggtgctttacctgcatatgtgtgtgtaccacttgcatacctgatgcccttggatgtcagaagagggtgtcaaatctccttggagtgacagatggtcattagcccctgtgtgagtactggaaaccaagcctgggccctctgcaagagccacaaatgctcttaaccactaagtcatctctcaagccccataaatttataaattttgagtgtgaaaatcttcaccatatttcaaaatgttagcatgctctcccaatccagaaatggagccaagatttcaagacctgggggtcaacatagttgaatcttatcctgtaccctaaatgagtaactgagtctcacctcctcagggcctgggaccataaaggtttccttggcctctctgcctgcagcattggctcagagacagcacatcagaatgtactgaaaaaagagagtgacctcattttatcatccaccagcaggggacctgtgcccctgcgtgcagcacccagagctccccctgtgttcacagctgcagctgcactggtttgtacaatgaaaagggtactgaggccagagacatggcccagcagtgaaggcactcaccaccaagcctaatgacctgagttcagtcccacgtggtgggaggagaactggctcctgtggtatcctctgaccaccacgtgagtcatcattgtacatgtgcaccgcataagctgtggcatgtgtgcacccacacaaacatgcccccccacatacaagtaaatagcataatgtaaaaaaaaaaaaaatttaaaggaaaactatgactatcagatataaagatccagatagaaaacctggggctggagaggtggctcagcagttgagagtacttgttgctcttgcagaggacctgggtacattttccaacacccacatgatagtttccagacttctgtaactccattttcaaggagtcaatgcaatcttctgacctccatgggcaccaagtaggcaaaacatttacacatgaaagtaaagtgaataaacacaagaaagccccttgtctgaagaaggtgtggggacctggcactgcctcccaggccagggttacaggttctctgaaggatcatttgtacacatgtcccctcggcacttgggggttgaggcagggggattgggagttcatgggacggcacataacaagactctgtcttcacgtaaatacagtttatctcaagaatttatcctcagggataccttcttggatggaatgcaagcatctagagctcctctttacactgctgtagaaaataggggaaatctggaaacaaccaaaatgtccaccaacagggaacatctaaataaatgacattaaccccaaacaaggcaatgctctgtagctgctcaaagactatactcacctcaacatgctggcagagaccaattactaacacatagtaagtactgtagcaaacaagagaaggcagtagtgcatatttacctataaatatagttgtgggccgcataaggatgttcagatcaatgatagattaaatgtgcagggttgggcctgtaagattgtatcatctagtgatgtcgtagccaccttagctcgtgcaagcatagttctgacatgttcacataacagcggaattcttttatagatctcagatggtatccgtgccatcagtcagagcatgaaatatttatgaaaggaagcataagaaattggaaacaggaaaactgtgattagaactcagggaggagaggaaacatcttactgttttcaatgagaaagagggagggggagggggagggacgggggaggggagcaggtttgaacccagggtcatgtgcaagnnnnnnnnnnnnnnnnnnnngggtcatgtgcaagctaagcaagtacttcaccatgaactacaaccttctcggagtctttaataaatctttttgaatgttattctatttttaggcatcaaagattcaaaacagttttttgtatacaaattggttagcaggtttataaaaagggtggaggggaaggtatttttttagtctggcagagagttcgtttagaaggaactaaggaagaaggtgggttcaggtttacaactcatcccagctcaccccaagacctgactctccacagcaacagacagaggtggtccacgtatcccagacccaagaagaaaagctggctgctgccctcagtgtagagttacacgacacttcacgccaagtccagagtctccaggctgagacggaatctttacgggctctggtgagtgtgccaagaaaggccctggtggtttttatgtttaactctcaactgtcagtttgatgtctcatagttcatagcctgcaaagggcttccttcttacaggatgcggtttgggcacctgaagtatcttctaaactctgatcagatactgactcatacttaacaactgccctggacacggcagggccctgtggaaatagcccttacctgcctctgctcggaatgttggctgctaacactcacagctgttccttctcagatgccctgcttcttcagagacttgctatcagccaaacagaagactcctgatccaagaaggcaggccgtgcccttgacccagacagtggcaggctgatggttttgaaagcccagtctactagcttcaaagtgggaacagctgtacagtgctttccacggtattggacggtggccagttttcaaggaggctacctccctgcttagcgtcttccctgacccgtcttctttttctcagtcaatcctccttttcctgagagtaatcctggaactgtttataagttccaagatccttgtctcaagctctgcctctggagcccggccccagacgcctagtaagctcaggcccactgtggtttgcaagcaggtgccttacaactactaattattagtaattaaaataattatagtcagcccctgtatccatggtttctccatctgtggattcaatcaaccttcaggaacaacactgcacctgctctgcatgtgtgcagcctatatttcttaccagtgttccctaaacagcaacctaatcacctctatagcaggctgcacattgtatcacatgcgagtcatctatagaaatgtcatgagatttaaggaaatatgcaggaggaatgtacagggcatatgcacatgtgatagctatttctgtaaaagacttatgtctataaatttaggtattctcaggcatcctggactcaacctcacacagctcctaagatgactaaattaagctccaccttctggtctggattggactgaagctctgttacggtagcatggcatctcccccatcattctaaccaaagagcattgttggaccatatgtgtatgttagtatgtttttacatctatatcaatgtatctatattgatatatcttatatctatatataagaactcaccatgttccaggagctatacccagtgctttggggacataagacacaccagggaataatactcctagggaattcagtgacttctatagaggaactgatgccaccttaagaatcacaaggctcagcatgtgagggagtgacaagggggagactagctccactataggagtccgtatgtttattttttggtgggtatagagaagggcagagttggggtagggtctagttggggtagtctccacccaccaggaagtctacctctgtctttactcttctcctagacagggaagtcctgtgaatttgggacgagtgcttagacttgtgatcttgaaccccgggctcctgtcctcactggtcatatgaccttctaagtttctattttcacctctgtctagtaaggatctattttagttgttctatgtacctgctgtctttgtggcttacgacgtcagtgaatcatgtgctctatcgtcctgtgatttaggaagaggtcagcagggacagctcttccctatccctcgaggtgtctgctgggcttgggacacccaccgtggcttcttcagctcacgtgtgagattcctcaatcgtgactctatgtcctgctctctgagacctctccatataggtagctagcttggagatccttgaattatggtggtctcatagctacagcaggacttctgataaggtaccttgtttcccttatacagtgagcataaattgatcagatctctgacctcctagctttggagtttctgcgtatcatgtacctcttattctactggtcaaagcaatcacgagagatctaatgagcctggattcttggcaaggtcaccttgagaaggcccatgcaggacggtgacaattgttgcagctgcctttggaaatgtgatctgtcctacgatcagaatagacctgacctcagacagtcactggggtgactaattagataatgtatgtcaagctttttacactgtgcccaacacaggcaagcagtcaacaaatggcacctagtataatgtattaggcaaaactataaccaccaacccaagaacccctacttggcagcaacagccaccctgtcacctcacttcagccccatgcttctgttgggacaaatggaaaaaggaactcacatgctgcccaagatgggctagctctgtcccctgtgggttccggtggatcaaagttcccactattatgtcttacagccaaggtgaggaacacagactgagaatagtgggggatggggaggagatagcttatccagctatcctgagtcagaacaacctgtgcacgcatgggtacatggtgcccatcactcttgtaaggcatgtgccaccactgcccagctcagagatcccactctcctttaatcccagcactcggaaggcagaggcaggcggatttctgagttcgaggccagcctggtctacagagtgagttccaggacagccagggctacaacagagaaaccttgtctctaataccccccccaaaacaagagtgggatnnnnnnnnnnnnnnnnnnnnnnnnnnnnnnnnnnnnnnnnnnnnnnnnnnnnnnnnnnnnnnnnnnnnnnnnnnnnnnnnnnnnnnnnnnnnnnnnnnnnnnnnnnnnnnnnnnnnnnnnnnnnnnnnnnnnnnnnnnnnnnnnnnnnnnnnnnnnnnnnnnnnnnnnnnnnnnnnntattagtgtaccccttgacaataccccaaatcatcaaggaaacccctcaggccacatagggaacttccctaaaacatgggacaaaaactatagccggacagcccaagcatgttccagtgatgtgtttctctaaaccacagccattacagattcagtgtcaacaactcacaaagaggacataggtttagaagtctgttcaaaacaaaaatctatttcctacataaaatgagagagagagagaacaaacccaaggccatgagaacaaatgattctccaagtctaggccatttctgcatgcccactgctgtaaagggctctcagatctcacaagctaaacagcaactaaggccagaggctgctctacgcttagtacatagtatctcacactgcttcctaaaaggcactagaccggctatctaactcagagttcacatgtcctgtggagttaagaacacccacgggctggggagagaactcaggcagggaagagcttgtcctgaattccatcacctaaacctgtatattgaggggggggcaggaaagctgggcatggtggtgtgcccagcactgaaaaggataagccagagaaagatcctgcctcaaaaagaaataaacactaaggaatagtgtctgaggttgtcctctgatgtacacacacacacacacacacacacacacactggcatacagaccccacactcatgaacacttacaagatttagctaatatgataactttgcctaacagcaccaccaacaagaatctatttctgctatagcagttagaagtctatttttaaaaacatgccctggaggattgggtacaggaatttaattcatcaagatttgattgaatccaacttagaaaaaaaaatttgtttttatgtgttacatagccagtgtagcacatacccttaatctcagcacttgggaggcagaggctggcagatctctgtgagttcaagaccagcctggtctacatagtgtgttccaggacagccaaagcttatagtgtgagactctatctttaaaaaacaaaaaaatggtagggtaggtactgaggctgcagagatggctcagcatttaagagcatgtgctagccttgcagaaggcccacattcagttcctaaaacccatgtcaggtgactcacacccacctattcctctggctccatgggctcatctgacctccataggcacccacactcatgtgttcacaccctcattcagacacacatgaatttacaaaattaaaaataatacgctgggtatggtggcgcacacttttaatcccagctcacgggaggcagaggcaggcagatttctgagtttgaggccagcctggtctacaaagtgagttccaggacagccagagctatacagagaaaccctgtctggaaaaacctaaataaataaataaataaaaacacaattttggctgaagagatgactcagcagttaagtgtacttactgctcttacagaggacccagattctgtttctagcacccacatggcagctcacaacgtctgtgacttcagttccaggggttccaatgcctcttctgacctctgtgggcttctgcacacatgtgacagacatacacttagtatacacatacacataaaacaaataagaaaaaaaattaagaaaaaaaagtctcttcaaagccagatactaaaatataaggtcactctacttggagctattaaatatgggcacactgatgcttagtttctgaccagcctgtgctaactttcagggcaccggacacagaaagatgagaagagacaggtccttagtctgatgggaagagagagcagcagggcaataaacataaccacagagcaggtgccttcatccaggtgacacatatgtcccaaacacctggcctgcacaggccctttcctggcactgagggtacagagaccagttttctgctaagtcccgccattttgtgagaaaggcacatccctgtggtaagttcaaggacatgcgcatgcttggagccatggaaacaggggagctcctagcccaactgaggggcatcgaggaaggcttcctagagaaagtgacccctgaacctgagcttgggggtgactaggaaggaatggaattggaatactggagaggcagagagggacagtgcaggtgtaagaaacgatatgcagctttatataatggcacgcacctttcatcccagcagcttggcaggcagagggagctctgtgagttcgaagccagtctggtctacagagtaagtggccagagctatacagtgagaccctgtctgaaaaagaagaaggggaggagaaggaggaagaggaggaagaagaggaaaaaaaaaaaaacaatatgaaccccataagcttccaagaccagaaatgttgacactaatatagagtaggaaatgaaatggaaagtcagagccagcaatggcaaccattctagggccccttgggagccactggggtgataactaagcagaggagataaaaacccagatgtgtattttgctaaggcactgtaggagctgtgtggagaatgtaggaaggcagaaactaaaagcagggtgttgcacaaagacaccgctgagctgaccttgggtgataaacatccaatcccaggccacagtgttgggggagaaaaggcagtgtgggtgtgaaagcttcacaggaggtgtaaaagccgggactctatccatccatggccgcgatgacagaaagggaagtctggggtgcatcttctcccagcttccccagccgaagcacccatagccaacgtagacatctgcgccggaggtaccaatgcaggagtcatgatccgaaagctagcaacctgagggaggtagccatcagccacacagacccggaatccctgctgtagggtctctagctccctgtgaggcagttgaaactcaccaaggagcaataggacgggacctaacaaagatgtattattaaacagcacagaaaaacactgagaggtaacggacagacacatgcatttcagctcccccctggccattctctcttgcccgttgcaaaaggtccgtgaagcagagtggggccttctggctctcccccagggccacggagaccgatctctatcattctacggggttgacaacatcagaaaaatgggtagaacaggtcggtcacacatttcctacctggaccgcccaagccgataaccttcactcttttgtagaaacgaggcctggaaaacagcttgcacgacgcccagcactggcatgacatggaactgcagaacctgggtgccgtggtgggcaggctggaggcagagctggcagagatccgctcagagacagaacagcagcagcaggagcgggcacacctgctggcgtgcaagagccagctacagaaggatgtggcatcctaccacgccctgctggacagagaggagaacaagtatggacatgtgatgtgctcgggttcctccttatctgcagggaggatgcaaatggggcatgggggtggggttgggctgaattggtagagagaacacttgcctaggattcacagtccctgggtttaactcccaggactgcataaacctgctcatgatgacccctgctatcacagtgtactcaagaccagaacagggagaaacaaaaagcctttttcttaaacgactcttaaacctcttttttttttttttgaattgagatttttatttatttttattttatgggtgggtgttctgcctacatgtaagtctgtgaatcacctgtgtcatacacgtggagatcggaagaaggggcaggagttagatagttgtacgctaccacatgggtgctggagttgaatctaggtcctcagaagagcagccagtgtctctcaaacattttgaagaggcttcctgtcgactttcttctagctgagtgacataccagcagggctgctgagaaaactatgtttaatttggagtctacagggaagacaaacaaggtgttatgaatgacagtggagttgcccactgtcccttttgtgaaaaactgacttcacaaaatcaccctctggtttttattatgcaccgtggcacacgtgtatatgtgtgtgagcatttacatgtgtgcattcacatacacatatatgcatgcacaaacacacaaatactaataaataaaaataaagtacaaaagactacttagggatcacactgtccaacctctcacaactcaagagagaatgggaaggcccatgtggagggtgggggttgtccacggtcacacacagaggttgaagcaactctgggactagtggccctctttcaaagagcatagcatcccattgctgggatgaacaaccacagaaccatctgcaaaccttccagcacctcctttcaagtggaaaaaccgtcatctctctcccccaactgtctttttgtccagttgctttctgtggaatgtgaaagatgttcctaacaaaactaaatccttcagattcctgcacgcatatgagtaaatatataaagttttaaataaacatggaggagtaaaggggtggtatgtagttcaagtacccaccgaatggctgttccgcagatgtccagccctaaccctggccgtcctcattccctcctgtgcccaccagatcaccacacatccccagttactgacaggacttcacatcccagagttctggaagtcatttgtccaaaatccatcaaaccacaaaacaggggttcgaaccttggcactgtcttattccaaagaccaaattctttctcataacatggcttcctttcccacactcctaccgtggtatctttactgaggttccgtttctgccgcttctgactcacgtgtgtttcttttcagctaatgggaaaaccaaaaaacgacttcctcttttcacaaagaaaactctgccttcctcggcagcccaccggtgacgtctgaagaacctcagtggctgctggactccctagctgactcagacggagctccctgggggtggagagaattctgctcccatttctgtagtctgtagcttgaacaaccgaggcctctctgaataaatactttgcgtgtggctcccagtctgccatttgctgtggctaacttgctggtggtgcagaaacccttccttttctctgcaggtcccagggcctctttggggatttgggttggtgtttcatgagtatgtgcgtgtgtttgttttgttggttcaaaggataggacccagggcctcatgcatgctaagtgtgtatgatacactacaccccccatactgggagccattcttggatgcttctagacagcatgttgagcctgttaaatgagtccatcagtctcatcattgcctcaaggtcaactgttctggttttatcaacacacaaaggctgttcattcaaaagttctgcacttgacgggtaccctggtcacatgcaaatctctctctctctctctctctctctctctctctctctctctctctctctctctgtcacacacacacacacacacacacacacacacacatctcatttgcccatagcataacacctctccatcagtttcaacccatgggggactaattaggttgtggtagttcacccatttacagcctcaacatttcttttttgggatccacatgccagcgccccccaccgccccccacgccagccctctcaaggctcgggccagccaaatctattcatgcatctgcttcccacgaaggcaagaccctcctgccctcagattacaactgaaaccaccacctgtgtgggaccacaggctctcagtgcttctaaaaccacacaccaccacaccacaaaaacaaacacgtctgtttctgttacctgcctgctacacagaattagaccaagataagctccgtcgttgtccctttgtcactgtgagctacttaccccaacagagggatacatccctgtgtgggaacatttgaagaccttcatatggatgtaaagtcccaaaaagaccaataaacagtgtttacctttatttaaaaacaaacagccgagaatgtgaggttgcacacctttaatctcagcactcaggaggcagaggcaggtggatctctgtgagttcaaggccaggctgacatacaaaaaagagtttcagaacagtcaaggctgttacacaaaggaatcctgtctcaaaaaacaaaacaagccaacaaccttttaaaagaagcaaggtgtgtcctggttaggattctgtcccgtagatttccttgctggcctgcaggaccaaagaaagagaacccacgagtctcccagaaggccagttacttagactctacacaatatctttacataattcagtgtctgaagtccagaaatagaaaagacaccacttacgctccgtttcagctaagcctccactgccctgctagcttgctcgctgcgaactgctcctaattgaaccacctgggtgcaaaagccatcaggaagacagtgcagctgtctcagcgacattggatgctgcaagaccttcttgcctttcttattatccttaattattatttccaagccaagatttcagtttccaacctctacacagcccagggcctggaaggtgaagaggaccccatgctggggttttgtttgtttgtttgtttgtttgtttgtttttgccgaatctggaagccactggtatgcaaggagagtagatgcgcgccctctcaagggtttctcccagtggggctgcgagttttagactcttctgccctgcaaatctccacgagcaggtgccgcgagtcagaaagttaatcaccttttggcaggggaagatcatgactgacggctgcttccagttcccagcgcaggctcctgctgcttctaatgaggcttcgttagcaggtatgaaaaggccccgctggcccctggattctgccagcgccttttgaaaatcagacttcctctcacaacatcacggtacaattacccgttggcagtggttccctgacaggtggtgggggaggctgctgccggtggtgacgagcatttgttctggagtagatgggtaaagggctttggctggattcctcctaagctctttccacaccgtactactcaactccatggattttgggtttccaggtgtgtgcttgagagcgcgcgtgcgcgcgcacacacacacacacacacacacacacacacacgcacgcacgcacgcacgcacacacacacataccataatagcacccattagcgttgagacccccacatcctttgataacaatgtccttaaattgtacttcaaggatattggtaattcttttaagcatggattgatgctcaaatgttttgacagactggggggagggggaatacccatataaggaagatcatttctgttctcatgggttgacaatcttggtggggcaaggactaaacaaagcaacgtggcactgtacagtttgcatggccccttccctgaattcattttgtccccaaaggcatgaagataaatctgatttcagttgcttctccactacaggattcagtaagtgccacccagttcactgccctttgtttaactgccctacacacattcttcaataagcccttgggccacctcaccagcttttacttaattacacccatgtgtttgttgggaggagcttgtcggggtgctggtggagtcagaggacaacttttgggagttggttctctccttccaccatgttaatcccaggggatcaaactcaggtcatcagacttggtgacaagtgcctttcccaatgagccagcttgctggctcaatagactgcctctctgggcaagataggatttgggccaatacagaatcttagcagtggttgccactggcaaacagaaatgtaagatgcctggtttaatttgtcagataaccaacattttttttttttttagtataagtatacccaacatattatatacatttttcttttccttttttacaaacaggatctttctatgtacccctggctagtctagaacacactatgtagaccgtggtggcctagagctttcagagagccgctcgcctctgccttcagagtgctggggttaaaggctccgtgccaccgcactgctattccttttgttgttgttgctactgttggtttgatttggttctggttttgaggcgggatcctcgagcttgctaagtagctgaggatgactttgaacttgtgcctctctccacctgctaagtagtgggattgtaagcatgcatcaccacccccagtttgcacagaaagggtcttttttgtgaggcggagtggttccagaatacaagatagtgttctaccaaaaattaaataattttatctgagtctggaggctagagagacaactcagctgttaagagcatgcagatgaccctagttcgattccatgtcagatggctctaactcagtggtgctcagccttcctaatgcttcgacccttaatacagttcctcatgttctggggacccccatgacagtatttgtttttacttcataactttagttttgctactgttttgcattgtaatgtaatgtctgttttcaggtggactcaggggactcctatgaaaagggttcttagaccctcctaaagggtctcaacctccatggggggggccatgcatctgccctccatggcacaatttatctgacagcccccaagattctgagacatagtccatgcttcaggctccccacaaggttaccttacctcaagtgacacatgaaaggttggctaggatgtctaactccgacattccaagacagggattagggaaggggccactggactctgtgtttgccatcagataagcatattcagggatcaacctgctgagggagtgagcaataaagcaagctatttttgaagccggagggactggcttaattagatcatgtaggctggttattttgaacaaaaggctaagcaggatcccagcatagacagatctgtgcagtcaacagaaaatgcaattttccctgtcatgctccagaggaaacattcttttcttctcttcctaggagcggaaggtaactcacactgtggggagtcaggctttttgcattaattctccatccaacacaaaaaccatgttgcacattaggagagccagctttgtaaggtgcacaggtagcaagctatggactagctttgtcaagtcataggtgtgtgtgtgtgtgtgtgtgtgtgtgtatgtgtgcacgcctaagctatgtatatggttcatgtatgtttgtgtggtgggtgtgtatgtgtgtggtatgtgtatgtgatctgtgtgtatgtatggtatctgtgtatgtgtgtgtggttcgtgtatgtttgtatggtgtgtgtgtatgtatatggtgtgtatttgtgtgtgtgtatgtgatgtgtgtgtatgtatggtgtgtgggtgtagcatgtagtgtatgcatatgtgtggtgtggtgtatatgtatggtgtgtgtgtgtgcctgtatgtgtgctatggtatatgtacggtatatggtgtatatgcatgtttgcttgcatgtgtcagtgcatatatgtgtattgctacagctaaagttctcactgagaccccaaacaagaaaaacaaatgtgaagctgaaaagtctatttcataaacttgacaagatgatgaagaaagaggttttgaacttacaacacttagtgatgctttggtgctttgaaaagaaacaaaacaaagggtgcaggaaatcctaatctccggtgagtggcactccctgtcatttagcttctggtgagccagggtaggcaagataagcacctggggcaccgagttgtcctgggatttagagtttggggaactaagggctagaagccaccagaacaaccatcattccccatagcagtccctccctactggatagaatcatcttcctccataaagatttacacgttcctggtgcatatcaacctgtgttaggtaccaacaacatatgtgcagaactcacacccacctgcacataatccagcctggtcctacagaaacggaatgtaaggaacacggatgactgaaaatcctctaaggctggggagtgggataagcaggcgaaattaagtctagtcacattttaatgatctccatatattattaactcttatcattcatggtgtaatcaatattttaattattaatggagtatttggcattatttctttggtaccaagtcttccaatcttgcttacatattatccttacagcctatctcaacttaggtactgagtcctccctagaattagttgatctgtgtatatttatgtatttagatcccatgaaacttttacttggaaaaatatatatatattcaagttgtttcaggaatatttcaaagctcaactcagaatcccaaacttatcttcttttctatcttcatctctatactgatataaatggtggctagagagacggtccaacagttaagaatactggctgttagccgggtgtggtggcacacgcctttaatcccagcactcgggaggcagaggcaggcggatttctgagttcgaggccagcctggtctacaaagtgagctccaggacagccagggctatacagagaaaccctgtctcaaaaaaccaaaaaaaaaaaaaaaaaaaaaaagaatactggctgttcttccagaggactcaagttcagtttgcagcatccttgccagacagcttacaaccgtttgtaacttcaagcttcaggagatccggtgcctctggcctactggggcacctgatctcacatgtacgtatccacattcgaatgtacacacctttacataatttaaaataataaaaataaaccttaaaaaaaatgtccataactgcttcacctgttttaacagagtttatttgactttgaaacaaaggaatgttcattttcaaagccacaaccctccaagtaggcggagcttcaaagccccaccccacagtaatacaacttcctccaaaaggccacacctactccaacaaagccccacctcctaatagtgtcacattccatgggcctaacatattcaaaccaccacattctactccctggtccccataggcttgttcaaacacatgagtctatgggggccatgcctagccatagcataatgcaaaatacattcaaaagtccaacttccaaagccccataatcaatcacaatctcaatagtttttaaaaagtccgaagttcaaagtctcttctgagattcatgtaatctcttaactgtaatccctataagatcaaaattgaaaagcagatcatgtacttccaacatatcatggcacagaacattcattactgttccaaaatgtcataatgaggaaatcctggaccaaagctagaccagaaaccagctagacaaactccaagtctcctccgtgtccagtgtcaaagcactcttcagatctccaactcctttcatcctgtgactgctgttggtagatctggcattcagcagcaacaaactttgttctcttgggctggttccactccctgttagcagcttttcttggcaagtattccatggctctgacatctctgacatcttggaatgtccaaagcaacttcaactttacagcttcttgttccagtgtcctgtatccacacatgatcttctgggctcctacacagggttggtgtcatttctccagctctgccctctgtagcactctaggccctggttgactctactcccctgctgctgctgtttttgatgactgtcccacagtactggtactggcatctccaatatgctgggggtttccactgtagctaggttttaccaatagcctctcaacggctcccttcatggtgccaagcctcaacttctttgcatgaccccttcaatcctgggctatcaactgcaactaaggctgcactttcaccaataggctttcctgacctctcacagtaccaagtctcagctgctctcatgaccccttcatgccttcaaaaccagtaccacctggcaattcttagacttcatcaagtccagctgcatcacgaagtacaaccttggctatctctggaacacagcttctttgtgttctcagataacacttcccagaagatttcacctcagagatgctggtctcttaatcactgctaatttcttagctccagctaaccagcatcaattgttccagtaaccccttctacccttgactctaaagccagagctaaatggaataaaactttccagatatgtggagagctttgggggccacttagcaggaatctgacattaggccaggataaggaagtaagttcaggcaataatcttaattttcgggtagaacaaaagaagcaggcttcaggaaagagtctgattttgggcttggacaaggaagtaggctcagatattttagtcatcctgataagcccttagaaacagagaccacgggctggtgagatggctcagcggttaagagcgccgactgctcttccaaaggtcctgagttcaaatcccagcaaccacatggtggctcataaccatctgtaacgaaatctgatgccctcttctggtgtgtctgaagacagctacagtgtacttacatataataaataaataaatattaaaaaaaaagaaacagagaccacaggagtgataacaggactttgcatgttgtcttgcttgttccttgactatttgtattcattgtactgcttgcccttatcacttgcatgtaattaaaatggtataaaggtggattggaaaaaaataaacctgtcacagcctcagaactggctggggtcatgctacaatgcttgctctctctggtacaatgcttgcgctctctctctctctctctctctctctctctctctctctctctctctctctctctctctccctcactcccgtgctggagaacctgactgactgagcaggcttgggcatggatagaagtctactaaaccctaccatgcatgcccaactttatgacattggatcatgacattgtcatcggcagagtccatgcttggggggaaaaatcctcacaactgagtaacacacacacaaaatacaaacacaaaaaaaaagcctcagtgttctaagtaagcttttggttgtgggttggacctcattcacagctatcctggggctcctataccctatgggccacaggatggacacaccattgtactgagacactaaaagcctttgtgtgggggtaaatgagatgtataatggtgaaagagaaaaggtatactctgaggaacagcaagctgagcttcaggactccattctgcctctgtaagaaaagaaaatatatacctgataattcagaccctagttaaggttgctattgctgtgataaataccatgaccaggggctggtgagatggctcagtgggtaagagcactgactgctcttcctaaggtcctgagtttaaatcccagcaaccacatggtggctcacaaccacccgtaatgagacctgatgccctcttctgatgcgtctgaagacagctatagtagacttctgtgtaataataattaaatctttgggccagagcgagcagggctgagcgagcagagttgacctgggcaagcagatcaaccagagcgagcagaggtaggtccttaaaaaattgaattcccaacaaccacatgaaggctcacaaccatctgtacagctacagtgtactcagatacataaaataaataaatctttttaaaaaaataccatgaccaaaggcatcatggtgggggaagggctaaacttgtagttcattgtgattggatgacagggcaggaacccagaaacaggaactgatgcagagaccacagtagacctcttgttactggcttactcctcatggctttctcagtttgctttctgagacagtccaggaccacctgcccaaagatggccaccctcagtgggctgggccctgttttgtcaatcatctatcaagaaaatgccccacaaaccagtaggacattttctcacctgatgttccctcttctcagatgtctatagcctgtgttaaactgacaaaacacaaaacctaacccacacaaatgtaaagctggtcctcacatagacctgaggtgccatttatgcaatccaaaagaaaacaacatagaggaggaggaagaggaagaagaagaagaagaagaagaagaagaagaagaagaagaagaagaagaagaagaagaagaagaaacctgcaacaagtgaacagagaatttaaaatcacctgaaagtaactgagcattgtggcccatgactgtaatctcagtagttgagaggtcagagcaagagagtcaggagttaaaggtcagggtcttacttagggcttctattgctatgaagagacaccatgaccaccacagcaactctcataaaggaaaacatgtcattggagctggctgtcaattcagaggttcagtcatcactgtcatggctgcatgcaggaagacatggtgctggagattagctgggagttccacatctggatctgaaggcagcaggaagacagagagagacactaggcctggcttgagcttctgaaacctcaaagcccaccctttagtgatgtacttcctccaacaaggacatacctgccccaagaaggccaatagtaccactccttattggcctatgggggccatttttattcaacccccaacagcaagcttatgttatatattgagttcctggctaacctgggatatatgaggctctgtctccaacaaacaacaaggaaagtggtctcacattattatgagttcccagccaggggaccagcccaaagcttatataatactggacactagttgttgttgatttttttgtttgtttgtttcattttgttttgttttgtattaagggcccatgagatggctcagctggaaaatggagcttgctgccaagactaacaaccccctgagatctatgtggtaaaaggagaaaagtgactcctacaagttgtcctctgagttccacgagcacattgtgtcatggcccatcaccaccaccacacacaaagtaaataaataaatgtaatattttaaaaaggagtgcaagctaccctgtacttaagactttgacacaaacatattctcaggagggggaagct

SEQ ID NO: 2415 - DNA, 774 bp, Mus musculus
tgcctaacttccattttctatagatgcttgctataggatgtgaaggttctgtacaaacagctggcagggtctgagctggagcaagcagatgtccccatgggcaccggtctggatgatgtccttgagacgatccgagttcagtgggagagagatgtggaaaagaaccgagcagaagcaggagccttgctccaagctaagcaacagacagaggtggtccacgtatcccagacccaagaagaaaagctggctgctgccctcagtgtagagttacacgacacttcacgccaagtccagagtctccaggctgagacggaatctttacgggctctgaaacgaggcctggaaaacagcttgcacgacgcccagcactggcatgacatggaactgcagaacctgggtgccgtggtgggcaggctggaggcagagctggcagagatccgctcagagacagaacagcagcagcaggagcgggcacacctgctggcgtgcaagagccagctacagaaggatgtggcatcctaccacgccctgctggacagagaggagaacaactaatgggaaaaccaaaaaacgacttcctcttttcacaaagaaaactctgccttcctcggcagcccaccggtgacgtctgaagaacctcagtggctgctggactccctagctgactcagacggagctccctgggggtggagagaattctgctcccatttctgtagtctgtagcttgaacaaccgaggcctctctgaataaatactttgcgtgtggctcccagt

SEQ ID NO: 2416 - protein, 152 aa, Mus musculus
MGTGLDDVLETIRVQWERDVEKNRAEAGALLQAKQQTEVVHVSQTQEEKLAAALSVELHDTSRQVQSLQAETESLRALKRGLENSLHDAQHWHDMELQNLGAVVGRLEAELAEIRSETEQQQQERAHLLACKSQLQKDVASYHALLDREENN

SEQ ID NO: 2417 - DNA, 1663 bp, Mus musculus
aatgcctgtgtgcctctcacaggctggtggggcggttctcttccagctcaatgaatgcccgaagctcatggaaggcagtagacaaagaacacgggacagggaagcttccagagaggcccatgaccaggctggggctggcaaccaaaagcccctggaccctgtaaacctgccaggcaccacagaggcagagaggatgagcaagaggagagtggcagcggacttgccctcggggaccaactccagcatgcccgtgcagaggcacagggtgtcatccctcaggggaacacactctccatcctccctggatagccccccagcatccaggaccagtgctgtgggtagcctcgtccgtgcccctggggtctatgtaggagtcgcacccagtggtggcataggtggtctcggtgcccgagtgacccgccgggccctgggcatcagcagtgtctttctacagggcctgcggagttcaggccttgccaacgtgcctgctccgggcccagaaagggatcacactactgttgaggacctggggggctgcctagtggaatatatgaccaaggtgcatgctctggagcaagtcagccaggaactggaaacacaactgcgggctcacctggagagcaaggccaagagctctggaggctgggatgccctccgcgcctcctgggccagcagctaccagcaggtgggagaggctgtcctagaaaacgcccggctcctgctgcagatggagacgatccaggccggtgcggatgactttaaagagagatatgaaaacgagcagccattcaggaaggcagcggaagaggaagtaagttccctgtacaaagtcatcgatgaagctaatttgacaaagacggatctggagcatcaaatagaaagcctgaaagaagaactgggctttctgtcaagaagctatgaagaggatgtgaaggttctgtacaaacagctggcagggtctgagctggagcaagcagatgtccccatgggcaccggtctggatgatgtccttgagacgatccgagttcagtgggagagagatgtggaaaagaaccgagcagaagcaggagccttgctccaagctaagcaacagacagaggtggtccacgtatcccagacccaagaagaaaagctggctgctgccctcagtgtagagttacacgacacttcacgccaagtccagagtctccaggctgagacggaatctttacgggctctgaaacgaggcctggaaaacagcttgcacgacgcccagcactggcatgacatggaactgcagaacctgggtgccgtggtgggcaggctggaggcagagctggcagagatccgctcagagacagaacagcagcagcaggagcgggcacacctgctggcgtgcaagagccagctacagaaggatgtggcatcctaccacgccctgctggacagagaggagaacaactaatgggaaaaccaaaaaacgacttcctcttttcacaaagaaaactctgccttcctcggcagcccaccggtgacgtctgaagaacctcagtggctgctggactccctagctgactcagacggagctccctgggggtggagagaattctgctcccatttctgtagtctgtagcttgaacaaccgaggcctctctgaataaatactttgcgtgtggctcccagt

SEQ ID NO: 2418 - protein, 456 aa, Mus musculus
MEGSRQRTRDREASREAHDQAGAGNQKPLDPVNLPGTTEAERMSKRRVAADLPSGTNSSMPVQRHRVSSLRGTHSPSSLDSPPASRTSAVGSLVRAPGVYVGVAPSGGIGGLGARVTRRALGISSVFLQGLRSSGLANVPAPGPERDHTTVEDLGGCLVEYMTKVHALEQVSQELETQLRAHLESKAKSSGGWDALRASWASSYQQVGEAVLENARLLLQMIQAGADDFKERYENEQPFRKAAEEEVSSLYKVIDEANLTKTDLEHQIESLKEELGFLSRSYEEDVKVLYKQLAGSELEQADVPMGTGLDDVLETIRVQWERDVEKNRAEAGALLQAKQQTEVVHVSQTQEEKLAAALSVELHDTSRQVQSLQAETESLRALKRGLENSLHDAQHWHDMELQNLGAVVGRLEAELAEIRSETEQQQQERAHLLACKSQLQKDVASYHALLDREENN

SEQ ID NO: 2419 - DNA, 95153 bp, Homo sapiens
  misc_feature (1)...(95153): n = A, C, G or T/U
cagaaaagctattttatcagcattcaagacttctgccccgtgattttgctctgtgaacttctgctgtaaaggtcttctgtggaattaaggctcactttgtacagttcaccatgccctgccccttttcccaccatacacttactccagctgggaactctcctcatcagttcggtggtgcaacccaggcaccatccttgctgcctccctctcctctctgacttgcactctctccatagctgtcctgctgacggtgtgctgcatgaagaggaagaagaagaccgccaacccggagaacaacctgagctactggaacaacaccatcaccatggactacttcaacaggcatgctgtggagctgcccagggagatccagtcccttgaaacctctgaggtaatgagcttgaaagtgctggccccactgcagggaaaccaggtccaaagagagccatggggcatctgctcatttctgagtgccttgctccttaacgtatggcccatggaccagcagtatcaataacacccaagaggttgtaggccctaccctggtcctactgagccaggatctgtgttttagcaagaatccccaggtgctttctgcacagtaaattttggaagcactgttctgggacttttggtttctgggaacaagtgaacaaatactcagtgaggacctgttttgtgccgagcactcccagggcactatgaagatgagagcttgctcctaaggggctcaggttctgagatgtggctggaggacaaaccccaacatcacccaaaaacaaagccaattaggggaaacacaaacacaagacgagttatagacaaagagctgtggaaacccaaggaggaaagccttcccagtgcagatgctaggaaggattaatggatttcaacaggcattccagcagaggaggtagcctgaggaaaggtgaggatacgtgctggatctgaagggaaagaagaatacactgtcagcatatttgcccaagacacctggctggtcagtgagtgagccgagctttgaacccaggactttaaccacagaatccatactctttccatcctcacacggagggtggcgtagaggccagagtgaaacagtaaagaaggataaaggcccaattagacacagccttaatggggtattatggcattgggactctagtttggggcagcagagagtcactgaaagttttgatctttgggtgacccagttttagaaggattatgctgatggcctggtgaaagcaccctatatgtgatcagcgaatggataaggaaagaaaataatggcttgatggatgagtaaatagatggaatgacacagaaagacagactaaaaataggtagctcaactaggatgcaattgagatggcccaggagaaagataacagacgtctgagtaaggcagtgagagctgagaagagttcttgtggaggtgcaaccccacccctccttcccgtgtgggtcccttccccagagcagccagggtgagcttttgtaaacataactgtggtcacatcgctcacatgcttaaaaccttctcatttctctccagttaaagttcaaagtcttgtataggacctgcaaggtagacctagacccaggccaactttccagcctcacatcacacccctctccccatcttttgctaagctccagccacactggatttctttttgttccttcacagcaccaggttacatcacacccactccaggtgtgtgcatgggctgtcgcctctcctacaacatcttcaggctctccccagcacccccttcacttgctcacctcagtgactccaacccatcctgctgcagggcccagtctaaatgtcacttcctcagcgaggccttccttaacctgccaggctgggttcagctctcctgtcacgtggtcttagctccctgtgctttttcattgtgaccctttttagagctgtgatatgctactggtctgatattagtttagtacccctctcccctacttgagtaaccagttgcttccacatcgctaaacccagcagccaattccgagcactcatcctactccatctgtgcagcactggcactgtcacatggcagcagaggccctgccttctcaggctctcccccagctcccattactgattccctgtcctttccccaacctctattcactggagcgccccatctcggtcctgccaccacttctcttcttttttttttttttggttgttgttttgtttttgttttttgagatgaagtctcaactccgttgcccagactggagtgcagtggtgtgatctcagctcactgcagcctctgcctcccaggttcaagtgattctcctgcctcagcctcccaagtagctgggactacaagcacatgcgaccacgcccggctaatttttgtgtttttagtagagacagggtttcgctatgttggccaggctggtctcgacctcctcacctcaagtgacccgcccacctcagcctcccaaagtgctgggattataggcgtgagccactgcccccagtcacttctattctctttctacttagtcccatgacttaaataccatctctgcactagagagtccagatttctacctgtaaccttaatgtctcccctggccccagactcacctacccagctacctgctgcacatgtctaataggcacctcaaactcaacacacccaagattgaacccttgatttcgccctcccaaccccaaaacccaaacctcacatgcagctcctgattacgtagatggtactgccagctgcctttccttcctgcacaccccacttctagtctatcagaaaatttcattggttctccctaaggaccagcacctctcattgcctgcacctctgcccctgatccaagccagtctcctccctcgcaccatgagtgctgcaatggcctctaaattaggactccccactaccatcttgccttctgcagtctgccctctgcacaagagccagatgatcttttcaaggcaggatcccatgtctgccacagcttccactttcaagtggctcttctctacattttgaataaaatccagactcccattctcatgcccttcacaagttggcccctgcccaccacctgagcccccaccacacttcccattgatcacacaccagcttcagtggcctctttgctcttcctcctgcacaggaagcttgcccccaccttagagcttcgttcttgcaccctatctgaaatgcttttctcctggataccttgaaccctcaattccttcaggtctctgttcaaatgccacctcctctgggaggccctccctcccttaccactctgtattaattaaatctccaacctcattctgtttcctcttccttactttacttgtcttcagagctcttctcaccacttgacattgcatcattgtctctcttttgattggtttgtggtctggctgtcctgctgcctgaggcaggagcattgtttgttgtgctcactgctctattcccagcacctggagcagtgcctggcacatggtaggttcttagtaaatgtttatcatgtgaatgaactataaatgttgttcaccacaatttacccatcacccagtcagagcctaacacacagtaaatgcccaagaaaaatttttaagcagaggacaaacgaggggccagcttcactgcagcattgacctttagtggggcctgtatacattttgcatggaaaaggtgttcctgagatctgttgtagtaagtggaaaaaaatatgtaacttgacaaaggggctggtcctactttaggtatgggctgtgaacccctgaactttaaatttctcatattctctttgcaaattggtaaatgaaaaccaaagccaaaggacaatactcgtgaacgcactatagaaaaggcccttgcttttagaacatcccagttagtcatttggcacagagcacgagggctgccgtccaacacaatccagaggctctggtagaaagggctgccccagccagtcgtgatcttcagaccaggagggcgccataggacctgcagcacaaagctcagcttggcttcagagtggattggattttgctgtttccctcccagcaagcagttcctcttgttctgctttatttagagtaatattacaatttgttccaattctctgggctcacactatatgagggtaaatgcaggcagcctagggccaggatgaagccagccaagcacacacacactgctgaccatctctagagcaatcataaggtcccagttcatattccaccatgttccacatcctcaggacatgtactcaccacctgccctttagctgctaactttggagactgccaaatggtttgcctaagcaagttcctcagttgccctgcccccactgctgtgttgatgcaagcagcaaaacacagatccagggctgtacagacaaaattgtgatgcccaaaaagtgcttggaaacttccattcttttttctttttcccacctcctcctcctccttctccctgttttctcttcttccttcttttctccctccttctctcctcccttcttttttcttctcctttgctttggttgtttcctgaataactctctctttaatgcagcaaaacatacccacatggttttgcctttggtgaagacttgctttgtgaaagctataaaatgacaagccaagctcagcctccacagttaaacccaaaagcatggtggaggaaagggatttttgtctcctctttgaagtgctccactattttccttagatggctggccccatatccacccttagataggtgttgaactaattccagacactgaaggaaattcttgtcttctgaaaagacattttatcaacaatggcatttcttccttaccttatgattcatacagcagtaagtactcagaaagtatctgttatgtatgttttgtttaaaaataaacttcagagaattaattgtggctaagcaaatctggcatgagccagtatacctaggcctatagttgagtctttgtcctgaaatggcttgaaggttccaagacattagctgttttaattggaagaagctatgactttctttttttctctctcttaattagtaccagggcccaaatccaagtacagccatttagtagcccgtaaatgtttgcttgtccttggtaagtgaaaccaaaaccctgccaaagccatacagattaccttctgggcagtggatggcctatttctaggcttttctgctcctgcaactgaacatacagactgaaattttcatctgtcacttattatgcagtcacacagagatgcagatccattcagctcagcatcactagtgctataagaaatggggcaataattctgaccaggctctggaaggactcagagcgggaaggaattggcccttgaagcctcttgacaggtctgttagatcctgacaggtgggtagcaggaaacaggcgagtgagtctaggtgtattcaggaaggaaaagcagagaagtttcccagaagtctgtgagaaagaggcaggaagtagtctgggtgcaagtggactgagttttgccactagtgcagtgagccatgcactgtatgtgtgtcatgcatggcaagtcccctcagactttgacaaggaaagcagtaccatctctggcaacctgggattggggtgattccagaagcagggaacattttttgaaagctgctataaaaatatgaaagaacagcacaaaaattaaaatatacacctacacacacacacacaaattaattaaaagaatggcatagagggctgtgcacctcagcattagcagtagggatgatgaaaatgtgcaccaagccatcagtgctgaaataaatgttcccatgtgtacatttctttaagaatggccacctcttaagccttctccagctcactccatctcctccctctctcttcccaggaccagctctcagagccccgctccccagccaatggcgactatagagacactgggatggtccttgttaaccccttctgtcaagaaacactgtttgtgggaaacgatcaagtatctgagatctaactacagcaggcatcactttgccattccgtatttttcgtctctaaattataaatatacaaatatatatattataaatataacctttgtgtaaccctgacttaatgagaaacattttcagctttttttcctatgaattgtcaacatcttttttacaagtgtggtttaaaaaaaaaaaaactttacagaatgatctgtggctttataaaataaaggtatttctaagcaaagcagttgcattgattgcttctcttaataactattcttgagcacctggggatcccaggaaccctggtcaggtgaggtaagagactgacctcctgtagaagctgaatgttacagtggtcaagcgcacgattctttgagtgattcttaaagctctggttcctcttgatttggtgtgaccccatttcctcccttctcatacgcacacctgtaaagggaactggaccgcctcaggggaagacggcagactcatgcacagagaaggaaaagggaacatctcatcacctccgaggatgagtaccctggagccttatgacggcaccattggatgtcatgtttaattccatccaagttgtggatggcaggcaggagcatggagccctcaggaatccatggaggacatcaaggcatcccaaggccatattcccctaacattacttccactgctaacaacaggactgcctttccctggtgggaaaatgctccctttatgcccattcctgtatcccctccaacacccacatctgcattaaacacccgtgcctttctcttggagagggtttagatgcagatcccggccctggagctttaaaatgcttgcccttccttcttcaaggatcaaatgtttattggggttcagctttgttttctcaaaaggccatggtatcgtgcccctgaggaacatgtttatctaagaagctttgaggtagtagagcgataatttttgaaaccttcctcctgcaatctttaaaaaagaaaaaaaagattgcccaaacaaatcatttgggagaagacatcattatactcctacttggcactgcaaacctgctcgcagcaccagccggtggacttgccatccagctctcagcttccactgctccccttgttcccggccggctggctgcctccccgtgctgtgtccagcacggccaacaacgtcagaccctcagagacgcccaaggggcttccagaggtggccgcttctctattttttcctgattgtggctgagagagatgattactgctttgacacttcctttctctaaaagaaaaatagtttgatagtatattttgaatatagatgctcttatagtcagattgggaattgaacttgaatattgggtcatatgtttgtgttgttgctgtagtctatcatgacttttttctttctgcattttccttaaaaaaaaaaaaaagatggccttcaaaagtgtgttctcaatgttgtatgaacctccttcacatgagttcggttgttgtctctcttcaaagactcttcaacccacaaagaagcaactaaatgtttctctaagtttaattttctagcgtgttgttgtcttacctttttaaccttaccataatatttctgttaactgttacatttaatataccaatgtgtgtaagtatacagagaaaaatctgtttgtaaagtaaaatttatatataatatatgtaatcaaagatacatatgttatatatacatatgtggatgtatgacttatttttccttatccacagatttcagctaccatgtatatataaataaacttattttattagccagaggattctgttgctaatacattttgcattcttttcaagataagctctaagtcttccttaagcagtaccaacaccactttatatccatctgtattttttaatctgatttaacagtaagttgagttttatgtatgtgatgagctaataggattagcagtttatcatttgataaaataaatctttttgaacatgtttgcagtttctccaaaacagactcatctttcatcaggtctttggagacagtggtgtcaaagtacatccccccctctttctccctgtctccagggctgagtggatttatatagtaaatatctttggtccggagaagtctgaagttaacctggccattgagtgttaccattctgtagagaataacaatgcctaaacatgacacatttgtgcacaacttaatcagtagcctgaacttttcattcagccttggacaatacatcttggaattcacaataatgcagatcctcagaaccaagtcagtgtcatccgtataggaggctgttactgtaacacaggctcgcatgccccttctgggtgcatcaggggtggtgttcacagcattaatgctacatctgaataaacaaggacactactggcctttacttaatccaattggttctttcatctgttcatcaaatagccaacactgatatttataaaatacctcccaggccatctcagagagacaaagtggaagacaataaagaaaggaagggttggagtgtcctggtcagtaggaaggaagtgcacacagggtcctctagtaggcgaccaggttttttacctctacctgcgtgacctcaggtaggtactctgctctctgggtggtgggcaacagggaggctcctaagtaagtcagtggcccagagtttggaagaggttgtctgcccccagctctgctactttctggacatagaaccttgggcaagtcattgcagctctcggggtcctcctcacataagaggacagtggccaactgtaggacatgtcattttagagctgtgaggtacacagcccatatggcagtacctgtcaaccctggacctccttcctcctgaggttgagttgagaattccacgaaataaaccataggattcatgcacacaccaggctggatctgctactcactagagattgactcccttctccttctctcacctgaggtacattcctacattacagcatctggaaaagtatccagctctggggtttggtgacctggtttctccagggtaaaacttatgtacagaggtttttaggtccatgttgtcatcctgtaactgggggaacctttctgatcctagagaagtgattgaggtgtgacccttggtggcttagtggatgccaaggtcaataattaaaacccaggggtgtcatcatatcctaacttggggcacccttggagaggcttaccagaaaacaccctctttgttgtttttatttctcagttttccaacagatggagaagcagaggtgtagggagtggccggaacatgtgtgggatctgaatttgcccaaggtccttatctggtgcatcagagagttaaaggcccaagccaatgttcagacagtgaggtccagagggaggaagcatcctggccaacagcaagcagctgatgaacagcagagcattagaggacagagatgaggaggaaaggagagaggtgagggaaggacctgaagctgctgccaggactgagagaggaaaccataggcaagtcttttctcttgggtccctggagctgcctcctgccatttttcatcctctattgcctgtgtggacatgtgttcacattcacatgtgccagcacacatagggatgtagaaagccctgaaatagctagattgagtcctagcttgtaatctgaggtctggggcaagtgatcagtacacttgtcatctgaggtccttgagcctcagtttactcatctgtaaaatggggttgcttgatgcctgccttgcccacttaggtagtaaaatgcacaaacccaaatggtctacctccacagcctgcactgatccagcctcccccaccaccagcagaataatctgggaggttgggcacatgaccctgcatcaaagaatgcatgagtgcctctctgcacacagccctgggcagtgcccatttctctttcagctcagtgaatgatggaaactcatggaagacagcagacaaagcagccccagggataggggagattccagagaggcccgtgaccaggccacagggatgctggggctgtaaaccaaaagccactggactctgtaaacccactgggcaccacagaggcagaaggggtgatgagtgagaggcgagtggtagtggacttgcccaccagtgccagctccagcatgcccctccagaggcgcagggcgtccttcagggggccacggtcatcatcctccctggagagccccccagcctccaggaccaatgccatgagtggccttgtccgagcacccggggtctatgtaggaacagcacccagtgggtgcataggtggcttgggtgcccgtgtgacccgccgggccctcggcatcagcagtgtcttccttcagggcctgcggagctcaggcctggccaccgtgccggctccaggtttggagagggaccatggtgctgttgaggacctagggggctgcctggtggaatatatggccaaagtgcacgcccttgagcaagtcagtcaggagctggaaacacaactgcggatgcacctggagagcaaagccacacgctcgggaaactggggtgccctacgggcttcctgggccagcagctgccagcaggtaagtgtccaggctgtgccaagggctttgcagagggctgggaggggctgctgaaggcagcgggtagggttgtgagtaggctgaggccagagaaactgaccataatcccctacactttcacacttaaaatggtaatgataacaacaatgctaccttttaccgaggtttactaggagcccacgctagcccccatacgtgcactacccactatcttctttaaacttcaaagaaatgctatgcagtggatcattcactgattgcatttttcagatgagaaactgaggcgtgtaatttgcccaagacttcaaagctagtagagggatggagatgagatttgaacctgaatttttgtgcctccaaagttgcatttgccccattaccctggggctgcctcagtcacctttactgttgagaagggatttttacagctattatccaatcaaataccattggatggatgaggtgttaagaacaatgaataaatggaggtgtgttcctgtatccacctacaaccacgctgttcaatagaaatatgaactacattggtaattgacaagtttctattacccacagtaaaacacgtaaaaagaagcaggtgaagttaatattatagcttatttaactctatatgtccagaatgttatttcaacatgtaatcaatacaaaatatattaatgaggtaatttacattcaagtagagctttctgcgtgatggaaatattaatatcttatatctgcactgtccaatctggcagccactagccatatatggctatcaagcacttgaaatgtggctaatgagactgaggaattgcatttttattttatctaattttcattaatttaaatgtaaacagccacaggtagctaatggctatcttattggacagggaaggatgcagaggtttcatctttctcccttgcttggtcagccctgcttttcccactctccagggtgatttctgcggagtctggagcacatccatcatgtctggcctgcagcctgtagttctaatgctgggactccagccagcattacacctctcagctggtctctctgtggatagctggcttcacctctcctcctcctctttctctccagatgctggccttgggatccctctgagcaaaatcagtctctaacccaccagggactgccaactcagacccttggccccctggagtccagtatgcagcctcccaagaggaggtcacaaaattttatttgtgtatagctgggggaagctaagcagttgcacacagggactccccatttgcccctcctgcctcccacttcatcccaggatgcttctcctgcactgctgtcagtgcccactgacagcacagagtgcatgatgaacagcaccatcctctcaggctctccccctggtgctgctgttctgcttgcatccatctgggctgcaagggagagccatcttagaacagtccagggccttaacgcctgtcaaatctaagaggcagccattcctccaggattcttcacaactgtccttattccaaatattgtgccataacaaccaccagaacatccctagatactccaatatgtcagcatctgctggacaatcgcttgcaatcagatgccacacagacttgtcaggagaaatcaggtatcccaatggctaggttaaaaagtagggccacaaaacttagtttatactcaatagatactgacttgttctggctccagatagctacaagagcctttgcaacttactaacttctctgggcctcagtttcattatctacaaaatgggtataacaatgcttacatattccagcaaatctgtagacaaataagagcctggctcctgcttacaggtagagtacagactaggaagctctaaaatcctgtgagagcaccacagccacacaccaagacatgcgacctctgtagttgagggtcaggatcccacatgggctcactttcctcttaagtgactataaatgagggcctgggtatgaataaagttctctttttcttcttttttaaaaaatcatggacttgaagatagagtaagaccaattgataaaatggagttattatttctttttttttttttttgagatggagtctcattctgtcacccaggctggagtgcagtggtgcgatctcaactcactgtaacctccacctcccgggttcaagcaattctcctgcctcggcgtcctgagtagctgggattacaggtgcacgccaccacgcccagctaatttttttgcatttttaatggagatggggtttcaccatgttggccaggctggtcttgatctcctgacctcaggtgatccacccgcctctgcctcccagagtgctaggattacaggagtgagtcaccatgcccagcctggagttactttttctatattgcacagcccagcctttcagccatattaaactctattccatcaagaagaacaaaagaaaactccataattgagaaatgctcctgattttttcagtgaatctggcctcgtggagctgcaggaggcccccaccaggcccccacccctttccaggcctagaggaaaggccacctcccagcccagtccttccacaacacgctgccttcatctcacttggggtcagaggcagccactctgcggtcctgggccccagaaatccagagctctctccctctgccctcacttaggccactctggctggggcttcatgcccacctttccagactctgggctctggtgttccgtgctcctcacagcactccttacccctcctgtttctccacctgcagctgcctcttcccccccttgtccacagaactcctcctggtcctgcagctcagttccatggcaaccctctgtgactcctcagggcccatgcagggcctgaggcctcagagcaagctctcagcaactgagccccaagttggcacctagagagaaattcgacctccttagcctgggccccaaacagagaatccaagagagacctcagtcactcaatagcacggtggggatgtccattttggtggcactttcttggatcaggctggagcaagcagtggggaaggtcagagcaggcaacaatttccataaatgtttgggaaacaacatttcctcttgctttcagagggggagaagagttggaaaggagacaggctctcctccctgccatcaccaccccagctagcacagaaagctcctggggccattctggggagtgggggccccctgtcccctggaatctccccacagcctgtctcacccccacccagaggagacaaagacaggttttcagaaaagccaggaagaggagccaggaggagggaaacaattgctgtcactgtgcagagagtcacatcatggaaagcaacacgaaactagggtgccaggagggctcacaccatggcagaatcaggaaggccgtcctggggaggggggatcttcctcatccttatatcactatgtaagtttggggccagggttggctccatgggtgcaccaccagtgaagtctcataggatgctgcactggagtgcagcgatgccatcagagatcactgcaacctcaagctcctggcctcaagagatcctcttgccttggcctcccaaagggcttggattataggtatgaggcaccgtgcccagccaatagttttatctttgaatttgtgttttaaaagtgaagtcttgtgggacaatggagtatggaccaggggctcttgaatggtcctacctccctctgtctccctacaacaggttcttggcccacctctctgcccctgggagccccttctgacacctgctccaagcccctgggtggcagcaactggagggagaggacaagcctcttgctcacccccaacccaggtacctacaggtggcactgaggtcgtaatattcttgggggttatcaccccaccccaccagcaggacatggtacatcggtccaatggccggtaagaaaggtaccgcagccattggtggggtatgcacatgcccagaatcatggagcgaggcctctggatgcctataaaggtctgcatgagcatccccattccccagggagtggaaattaaatagcagataaaaattaccataacaagttgaaacatgacagaagaaaggaaaaagcattatatttgagtaacttaaatcgcactttgttcctgctctttgaacatggggccccacattttgcactgggatccgcaaattatatagctggtcctagttagggttcatgcatatgaagttctgtttcaattccaaacctctctcctcccactcctcagctgtgttagaacctccaagcctcgctaagtggtgaaaacagacagaaaaaccccaggtggcaactacagaggctgaggaagacctgggccatttccctctccagccttgctctgtgctcctgacttttcttaccaaatgaacgatgctgacaataggctctgatggcaacatcaggccctttcatcctcaaataggccaaacacaagcttggaataaggcagccttgtgcctcggagctgcagatgaaaggagagtggggtcagaggagcagccctcagagaccaggtgtcaaaacaaaaggaacagctgaagccagggggagaatgaagctgcctgaggaagaaaggggagcgcagaggttctaaattaaggagccaggacatttgtctaggtctccatgggagaaaactgcagcttatacctccaaaggataaggctgtcagctggagaaaatgggaaatcaaaattgttgaaaggcaaaggattagagtttaaaatggacctgatttgactatttttcctgctgttcacagcccgtctttctgtcccttgcacagagacagcccatactcagggaatctgcctacttgaagaacatgctggaaactcaggcaatccagatctgggccaggtttctcccacagaacttgtggtcctagaaggctctctttttagaaaaaaaaaacaagaactaatccttctccactgagaataaataaaggcaacagggtttgttgttcatgatttacaacctggtatccctggaaagtaggtgatgggggcagaatcataatctgcaaaggcctgaacacatttccccaagaaaaagtcactcagcctgtttcttaatcagtgcaatttgtttggtcagagcaggccagtggggcggtttctttgtcagccaagctataagggacactacagtatggttagaaatgtagctaccagagaaaagtccgttagagagattcattcctcttaggaagagtgaggtatatgattggaagaaatattttgatgggagagggggagaaggaggcatgagcctgcttcccaagggtcttgttcatataatacaggtggccactaagcctctttatttatttttatttatttattttttgatatggagtctcactctgttgcccaggttgtggcgcaatctcggctcactgcaacctccgcctcccgggtttaagcgattctcctgcctcagcctcccaagtagctgggattacaggtgcccaccaccatatccagctatttttttttttttttgtatttttagtagagacagggtttcaccatgttggccaggctggtctcaaactcctgacctcaggtgatccaccagccttggcctgccaaagtattgggatcacaggcgtgagccaccgtgcccagccagtcactaagctgctttctaagaaaggtggtttctggaagttgaatgtgtctggaaagcaagagaactgctaaagaaaacagagggagactagggtgtggcactcagggcctctttccatgcccctctcatacaccacactcggccactcttaaacctcttaagatctcttaaaatgtgagttccatgttgggaaatggaagacagggggtggggtcagttttccatgaaaactagggaaaattagatgtgatgcaaagactggggattttgaagccagacagcccctagccttgccgcttgccatctaccaaccgtgtgatcttgagccaaggtcttcattgatctctgcatctcagtttctcatctgaataatgaggatgattagagacttcctttgacatgataaaatatctctaagaaggaaacactaggccttccacagaaattaagaatgagaaaaagatgcccgctctctctcgttggttagaggcagtagtcaatatgattagacaagagaaagtacttggtataagaattggaaagaaagagggaaaaatttggtctttctggaaatcccagaaggaacaatgtaaaaactatacgacaaacaataagatgatttagtgaagtagcacgttataaaataacatcaaaaagcaatgctgaggctgggcatgtgggcaaatgcctgtaatccaagtacattgtgaggccaaggcagaaggatcacttgagcctgggaggttgaggctgcagtgagccatgattctacaactgcactccagcctgggtgacagagcaagaccctgtctctaaaagaaaaataaataaataaatgctgctgggcatggtggtacaaacctgtagtcccaggtattcaagagggtgaagcagggggattgcttgagcccaggagttcaagaccagcctgggcaacaaagcaagggccatctcaaaacaaataacaaacaatgctatttatatataaacaaaaagataaaagagatgagaaaatcttatttatgatagcgtaagatgaatcacctctaaacttcagaaatgtccaaagtctatattagacaacaatcaaatctatctgaaacacacaaaatagtcttgaacaaatggaaagaaacaccatgcactcaaatagactcaatagcataaagatgtctcttctccctaagttaatgtatcaatttaatgcaatcctaatttttaaaattccatttttttttctagagttagatgagttgattttaaattccctttgtaagaacagaaagacaagaatggccaggaaagaaaaactaagaaagagtggaggggaggaggctggggaggggaccagcagccccgccagacattaacatattataaagtctctgtaattaaaatagtttagcgttggcacaaaaaagatgagaaaaccatggaacagaatagaacattctatagtaagctctactgtgtttggaaattgagtattgatgaaggcagcatttgaaaccaatagagggaaggatggactttttaataagtgatattcagacaactagatagtcataaggaaaataataaaattagatccatttcttgctgtaccctagggtcagttctaaatgtatcctagatataaaatcaaaaatgaaaccatacaagtagaaaacataggtgaattcctttataacttggatgtgggaaaaatttttcttgttacaattcaaaatacaaaagcaacaaaggaaaatattgataaatttgattaagaaaaattttaaaatgttgcatttcaaaatatcaccataagcaaaattaaaagataaatgacaaactagaaaaaaaaatgcaatgtaggatacaaaaggttaaaatagccctattttatacacagcatttaaaatttgaggttaaaaaaagccgatagcactcttttatttttaaatgttagagatatgaacagacagttgacacaaaaaatagatgaaaatggctcctaatgtctcaactgcactcataataagagaaatttttaaaatctacctgagataccacttttacctatccaattagcaaaactctaaaagtatgtcaaactatttgttggtgaagctctagggaaacaggcaagtttatacagtgttgatgggaatagaaaatgttacaacccctatggagaaaaatttggcaacatctagacaaattatataggcatttatgtatacataatttgacccagcagtcctgtttctaggacacactcccaatgacacactggcaaaaatatgaacaagaagtatgtacaaagctgttcactgcaatcctatctgtaataccaaaatactggaaaaatccaaatacctcccaggaggggactcgttgaataaaccatgatgcatctgcaaaggaacaagaaatcgctctatagctactatggagtgatgatctccaggatatgttattgagctaaaaggcaagatggaaagagtgtgtatttcattctaccatctagctaagaaaagggaaggatatgaatatatacatacatatgtgtttacattggaaaaaatggaataaaacaaaccataagtatttttaaatgttacttataggagggtggaggggaaaaagtagcagggaaaggtagggcactagagttcttctaatttatcttgttatgtggagatgactttggaaccatgaaaatattttacagaattgtataacaaaaatagatttcagaaagccaattctaagaatcaaaaataaaaagaaacaaatgaatccagctatgtaccaagttgatagcatagtcacacgaagaagaactattccaagtggctttttaaaccacaggaatttaactgtacattcctagtggagatgcaaaagacaacagaaaaaaacccaacaatttttcagtaatcacattggtggtggtagcactggcactgttattctgacactggtgtgtgtgtgtgtgtgtgtgtgtgtgtgtgtgtgtactgtgggacagagtaagagagtaactatatttgtgttattgaaaactgagacttgaatgtgagtgaaaggagatacagttgtaagatgcatgacgtttagtgacaattctttagtcttgaaattaaatcagaattatcaatataaagtcatgatatatgtgatcatgaaaataaatatatgcctatttccaagtctgaccactgaaaagatctagaagcaatggccaacttagcgacaatgaacatttttagcctcagatttgggtctctaacaaccatctttcactaaaagaatggggggctccttgtagaaatggctgaatccaggttcgaggataggaaatatacaagacgagtctgaaacaccttgtcataccagaaagcaaggacgctatgaaaaactactacagtcatgtcagaagacttaggagtcaattcaaagaagctcccactaaccaaagatggttgggaatcaataagaatattatcagggcttccagtaaggtgaacaagaagacatccatgtgctgggagggtggctaccccaactccatggggacagaactcctgtgctcaggactcttctacacctcatgctgtggaatctaaagcaacagcaaagctgaggtccaactgccataaggatggacaccaaggaggctgcactggggagaaaaagaagtcaagataagcaacatgaaccataaagcccggaccgtggcgggtatgaaagaacaagaaaggcgggatcaggaaattcaacaggacgaagttgccttcccacctagctctcttctctttgctgagccatacaaaactactagcaaggaagataagttatcgagttgtatccagagtaggcttggaaactatggtgaaatgaaagattttataggagacaaatctataccaaggcttattgcagtttccaagcctacggtaccacctataacagatgaaaatggaccccagtaggacctctgcacccagcatttctgtcccagaaacagtcctcaggcttacagagtggacatagtagccagtagaccggtgcaggtggcagcagtggcactaacagtcgtggccagagacatgactgtgactcacatagcagtagtgggagcagaagaccagagaaaaatgtcagcatggatcacagcactccaagccgcgctcttccagccctgggaaaccccaggctgtctcttcgttaagctccagtcattccagctctcatgggaatgatcagcatagcaaggaatatcagcgctccaaatcacctggggaccctaatgcaaacggggattctccctctcacgtatcttttccaagtgggcagcactcaaatcagtctttcccaccttcgttgatgtcaaagttcagttcaatgttacagaaacctattgcctgtgtgcagcccgtgggcggacaggagtccgtgggcggacaggagtctgtggaaccagagctgtcctctgagcgctacagtagccaatcccatggtgacagcacaaatgagctgcagcccagcagcaaagcacatctcgccaggctgaaaatacctttctaaccgctggacctaagtcacacattcagagcttttaatattgtgactatgtgaagcaattgaacatgaaattctgattgaacttgaactgcctttttgccttaatagtaaagaatgtaaaagtttagagatgttttaaagtttaaagaaagacttgtgagccacttccaagtgaatccatagagacctgttagctcccctcttgggaaatagacaaaatgtcatttacagttttgaaatattaaagtaagtcagttatagaataaaagcatgatccatcaagttttaaaagaatattattaagaacattaactgcaatagattgaaatccatcaaatatgtcagtataacaccgaaaaaaaaaaaaaaaactaattaatcacctttggagcccactgaggaaccaactcatttttaaaactggtaaataatgagagaaaataaagcattttcctgcctttcttataagacctataggtatatccagtaagaaaaataaataaagagaggaattatctttttatagatgtattccagctaataaagaaaaataatagaattattaattttatttatatctataataaaacaatggctctaggcaataacaataatcaaatggctatgaccttcacaaaatgcgaccagcagccgttctgcatctcctggtggagtacacatcaccacctatgaagtagtcttgcaaacaaacaaaaaacctgaatatgattaagcctcaagataaaactactaatttacagaaaagaagggggtcagatgaacgggttaattctatagtaagctctactgtgtctggaaatttagttttaataaaggcagcacttgaagccaatagagggaagggtggactttttaataagtgatatttagacactagatagtcataaggaaaataataaaagtattattatagagatgaaaccagcaaaatccaaactctgggaaactataagacaaaagacccaattttttaacaaataaaaattgcaagggaaagaagcaagatggtaagagaaatctatacagtaaaagagactaaattaacatatcagcccatcaaaatgggctttatttggatcactatccaaacaattaaaaaatatattagacacgagaaaagataaacactatttgataattgagaaagtattacgaaagtattattaatttttagacgtgatcatggttgtgaagtcatgtgttctttttaaagcattcttataatttgccagtacaggctgaaatatttgaagaagaaataatatgatgtctgggatttgttgaaaataatctcaggcagagtggcaagacgtgtgggcacaagtaaaacaaaataggccacgtgcttataatcaaggaagctgggtgatgcatatatgggggtccactataacagatttcttgtgactgacatttgaaatttttgtaaaaatgcagctagaagacctacctcatcgggttggtgcaggaatgtaaatgaaatgatgtgtgtaaatcgcctggcacataatcaatgctttaagtttgtggaattgaataaacttgaagacatacattaagtgagcagtaacacaaacagctgcttacatgagcgcgttgatcaaccgacatacgctgtgggagtttccagaaagagcagggtattgattagttctcagcaagggtgccccaggaagtggggactgaatgtgggtcccaaggaagatgccagaagatggcccttcagagcggggccccgcgtggaccaaggtgggagccgggcatggcgtcctcagggcagtctgggtgccgggcaggcctcctaccaagcgccagctctgccggggccactgctctgtctccctccctctccacttccagagcctggcacagggaggcatacctcgacacacagcgggtgttcaagaaacggccggtggtgaaaggtgaatgtggaaccagacaggctccaggtttcaattcagaactccagctcaggggttctctgaaattccagaccagcagtgagacaggaagcggctgcaatgtctgacacagagaaacaacgcagcagaatcctctgccgctgtgagaagagaaccaggatgctggttagatactgacgtggagctggcgccagaatgtatctgagtaaccacgtctgtgctctgctactatttctgtttcttagaaagtggagggcagaccctctctggaagcacacataggggctgcggacagtggaggcttctggtgagagggctggggctggagacagggcaggagcaggcttactttggggtatatactctttgacactgtttggaggttttaccttaaataaaatatgcagtaataaataaaagtcctgtcagtggcttttggggtgggggaagcagtaattcctatcaggtcttggggcaggggaagccttcagaactccacggaagcaagagaacctttctactgacgtgtcccggtgggagagaagacccatctccacagctcctctcaaaacaaacccagccaaattaaacaagcgtacagaagagcaataggaaagatgttctaaagggctacactctccagaagagctaaattaaaactaatccaggcagctggcacaagtgctgaggacaaatgtggtggctttttacgggggaattagtgaaagaatggctgaaccaagcagaatgttactcagggtccccagcgctctcccagagggtttatgctgatccaccgaatttgaggactcaatttaggcaaataaaacctagtttattgtcgtctggctggggaaaagcacataaagactcatttatctggttgtaaacgagctagtagagctggctgtcacaagtgcattattcagcagaaacgagaagtgatttcagcagtcctcaggagggagtgaatgcagggcacaggagtggaaatctccaccaccaaactgaccaccactggaaaacaacttgtcctttttagttacatgtttattgcaggaccaacgaataaccatctaaataagcgctaactaaataacactacagtgtggaagttagaaagcccccgcatttcagcaggctctgggaaaaattatgcagaagacaaagtcccctgctgaatgtaactgcccacgcctgcctggcccctgtactcacgccctactcatccctgtccgctcccgtctactcacccctgccctctctcccctactcacccctctactcacccctgccctctcccctccacaaacccctctactccccccatactctcccctctactcacccctgtcctgtcccccctactcaccccgtcctttcccctctactcacccctgccctctctcccctactcacccctctactcacccctgccctctcccctccacaaaacccagtactcacccctgtcctgtcccccctactcaccccgtcctctcaccttactcacccctgccctctcccttctattcaccccgtcctctcccctctactcacccctgtcctctcctctctactgatgaactactgtaccnnnnnnnnnnnnnnnnnnnnnnnnnnnnnnnnnnnnnnnnnnnnnnnnnnnnnnnnnnnnnnnnnnnnnnnnnnnnnnnnnnnnnnnnnnnnnnnnnnnnnnnnnnnnnnnnnnnnnnnnnnnnnnnnnnnnnnnnnnnnnnnnnnnnnnnnnnnnnnnnnnnnnnnnnnnnnnnnnnnnnnnnnnnnnnnnnnnnnnnnnnnnnnnnnnnnnnnnnnnnnnnnnnnnnnnnnnnnnnnnnnnnnnnnnnnnnnnnnnnnnnnnnnnnnnnnnnnnnnnnnnnnnnnnnnnnnnnnnnnnnnnnnnnnnnnnnnnnnnnnnnnnnnnnnnnnnnnnnnnnnnnnnnnnnnnnnnnnnnnnnnnnnnnnnnnnnnnnnnnnnnnnnnnnnnnnnnnnnnnnnnnnnnnnnnnnnnnnnnnnnnnnnnnnnnnnnnnnnnnnnnnnnnnnnnnnnnnnnnnnnnnnnnnnnnnnnnnnnnnnnnnnnnnnnnnnnnnnnnnnnnnnnnnnnnnnnnnnnnnnnnnnnnnnnnnnnnnnnnnnnnnnnnnnnnnnnnnnnnnnnnnnnnnnnnnnnnnnnnnnnnnnnnnnnnnnnnnnnnnnnnnnnnnnnnnnnnnnnnnnnnnnnnnnnnnnnnnnnnnnnnnnnnnnnnnnnnnnnnnnnnnnnnnnnnnnnnnnnnnnnnnnnnnnnnnnnnnnnnnnnnnnnnnnnnnnnnnnnnnnnnnnnnnnnnnnnnnnnnnnnnnnnnnnnnnnnnnnnnnnnnnnnnnnnnnnnnnnnnnnnnnnnnnnnnnnnnnnnnnnnnnnnnnnnnnnnnnnnnnnnnnnnnnnnnnnnnnnnnnnnnnnnnnnnnnnnnnnnnnnnnnnnnnnnnnnnnnnnnnnnnnnnnnnnnnnnnnnnnnnnnnnnnnnnnnnnnnnnnnnnnnnnnnnnnnnnnnnnnnnnnnnnnnnnnnnnnnnnnnnnnnnnnnnnnnnnnnnnnnnnnnnnnnnnnnnnnnnnnnnnnnnnnnnnnnnnnnnnnnnnnnnnnnnnnnnnnnnnnnnnnnnnnnnnnnnnnnnnnnnnnnnnnnnnnnnnnnnnnnnnnnnnnnnnnnnnnnnnnnnnnnnnnnnnnnnnnnnnnnnnnnnnnnnnnnnnnnnnnnnnnnnnnnnnnnnnnnnnnnnnnnnnnnnnnnnnnnnnnnnnnnnnnnnnnnnnnnnnnnnnnnnnnnnnnnnnnnnnnnnnnnnnnnnnnnnnnnnnnnnnnnnnnnnnnnnnnnnnnnnnnnnnnnnnnnnnnnnnnnnnnnnnnnnnnnnnnnnnnnnnnnnnnnnnnnnnnnnnnnnnnnnnnnnnnnnnnnnnnnnnnnnnnnnnnnnnnnnnnnnnnnnnnnnnnnnnnnnnnnnnnnnnnnnnnnnnnnnnnnnnnnnnnnnnnnnnnnnnnnnnnnnnnnnnnnnnnnnnnnnnnnnnnnnnnnnnnnnnnnnnnnnnnnnnnnnnnnnnnnnnnnnnnnnnnnnnnnnnnnnnnnnnnnnnnnnnnnnnnnnnngttctctctcctctatcacccctgtcctctgccctctactcaactctgtcctctcccctctactcacccgtcctctcccttctcctcacccctgtcctgtcccctctactcatgcctgccctctcccctctactcacccctgccctttcccctctactctcccctatactcaaccctgtcatctcccctctactcatgcctgctatctcccatctactcaccactctactcatccctgtcctgtgtctgccctctactgacccctgttctctcccctctactcatccctctatacaccctgccatctcccctctactaaccccttccatctcccctatactcacccctgccatctcccctctactcacccctgtcctctcccttctactcacctctgtcctctcccctctactcacccttgccctctcccctctactgacccctctactctccccatcctctcccctctactcacccttgccctctcacctctactcacccctttacttgcccctacactctcccttctactcacccctgccctctcccttctattcacccctgtcctctccctctattcacccctgttctctcccctctactcagccctgttctctcccctttactcaccccgccccctctgctctactcatccctctactcatccctgccctctcccctctactcacccgtcctctgccctctactcaccccgtcctctcccctctactcaccctctatgcaccctgctgtctcccctctactcacctctgccctctctcctctactcacccctctactccttcctgccatctcccctcaactcatccctgccctctcccttctactcagccctgccctctcccctctactcacccctgccttctcccctctacttacccctgccctctcccctctctcatctctctactcacccctgccatctctcctctatccacccctctagtcaccccgcctctcccctctacttacccgtgtcctctcccctctacttacccgtgtcctctcccctctactcacccttgccctctcccttctgctcacccctgtcctcacccctctactcggccctgccatctcccctccactcaccccgttctctcccctctactcaccctgccctctcccctctacgtacccctgccatctcccctctactcaccccaccctctcccttctactcaccctcatcctctcctctctactcacccctaccctctcccctctactcacccctgccctctcccctctactcatcccttccctcgctcccatctcccctctactcatcccttccctctcccttctactctcctctctactcacccctgccatctcccctctactcactcctctactcactcctgccatttcccgtctactcacccttgtcctcttccctctactcacccctgccctctcctctctactcaaccctgtcctcttccctctactcacccctgccatctcccctctactcacccgtcctctcccctctactcacctctgtcacctctcctctattcacccctctactagaccctatcctctccattttactcacccctgccctctcctctctactcacccgtcctctcccctctactcacctctgtcctctcccctctactcacctctgtcctctcccctctactcacccctgccatctcccctctactcacccgtcctctcccctctactcacctctgtcatctcccctctattcacccctctactagaccctatcctctccattctactcacccctgtcctctcccctctactcatccctatcctctcccctctactcacccctctagtcccccatgccctctcgccttaactcacccctgccctctaccttctactcacccctgtcctctcccctctactcacccctgttctctcccctctcttcccacctcctcagctcctactgctagccctactgcccagagtacttccaggtaccattcccagctttcaactttacttcattttcatcatcttcattcccaccccccaggtaacctttctccagctctgaggagaaaggttaggtgatggagagatttattatcactcacccaccagggaaacacgggccttgttttgttcatctgcgcaatgaagatgaaaccattgctctcacatgaggagtaactgggacaaggaggagaagccccaggaggtcacgggagttcactgggtgtgggtacccagcgtccctgaggagattgcctgggaaatgaggcgctcatggcagcatccagcccacccaggccaggaacgtctccagggacagccttgggtaggcccctgaattcctgggtgcagttggcccagatccagccaccccccggaatgggcacaggcactctgggagttctctgggttcatcttctgtgaggcatgtccctgctcaatcccaccagccaaagaccactgagaacatacctatgtttttcctaacaaaatcatgttccttccctaacaaaatcatttacttccgtaagactcatgaggataaaaccatccacagtcttcactgaactgcaggcctctgatatgacccttgtgttgcgtgacgtctgcaaacgttaacaagaactttcactctctgtcttaatttgggcctctccataacatacggggctacctaggaagatgggattatgtgcagtgtatttgtcaccttgggctgccagaacaaaggcccatggactgtcttcaacaacagaaaggcattttctccctattctggaggccagaagtccaagatcaaggtgtcagcaggattgtttcttctgaggcctctctccttggctcatggaagggcatcttcaccccgtgtcctcacacaggcttccctctgtacatctgtgtccaaacttcctcttctcagaagggcaccaggcatcttggagtagggcccaccgtcaggacctcattttaaccgaattacctctttaaagaccctttctccaaatacagtcacattctggggtactgggccttaggatttcagcacaggaatttgggggaggaaggacacgattcagcccgtaatacccattttacagataaagaaactgaggccacagttagtgttccagccaggatcaattcagtgttgtttctacccctaaaatactgtttaaaaacttcctgtcacattcatctataaggcccgagttagtcctgtcccagaaccctgaagggtaggcgggcccacagtctatgtagagtgcccgtttgataagatagagctatagtcgacacaggccccactctgtgagttcagactttgggatgtgcctctttttctgtccttctctgcctcttttaatttggaagaaactgtcagaaagggtgattgatccttctgcaagcacatctctaactggaactaactgctttaaccaggacgcatgaggctgggcggcttccgacccatcagatggctcagaactgagacttgcaagtttaatagctttgctgctggggaatagcacagccctcctcgggatttctcattgtctttttcagtgattttaatactcagaaaaatgtgctgagcagtcagcactcaaggcagaatgactttatctgagtagagttcagagacgccccatggtgtgtggctccggctccgccaaaccactccgccacaggaggtgagcacctgctcgggtgggcgaggcctggcatgagggatttccacagactgctgggacccctgcccccgacaggggcgatcacctctcaccaccacctagcccagtggtaggggccaagatgccagtctccacggagtgaggcacggctctgttaaatcccaccagccaaagacccctgagcacatactcataggtggaaagagtgtattagcatgccgcagcaacagaaaaatgtaccaggagaacccgggacatctcaggaaaagggagttgggaggggcttgttatgaggtttaggcctgtgttaggttgttggggaaaggtttaagaaaggcttgttctgcatttgatgctgtcaggaagtaggggcagtttgatgattggggatcttaataatctttacacaagaggtagaaggaatgaagcaggcatagagctgctgttagtaaagaagcagcagtcatcactcgaatcagctggaagaggggatgttgagtttttgtggttgcagagcgtccttgcctctctgtccagatagaatcaccgcgtgcccttgtctccatctccttccaccatgatcacagagtgagctggtctgattattgctgatattctgtaaacgctcgtgcataggtgagaatactctggtctagctgtcagctgccaacggtcagggccatggttttccttccttacagcaagcaggcatcctcagcctcctcctccacagtagtgggaggaccacggagtcagaacggaggtgcaagcgacctctcttctcacgtgtcctgtgcagcccctgtgaggctgggggctgagaggtaattgtttgggctgtgctgtgactttaggagcagggcccactctgtgcctctcacgtgctgagcagagtgtgtccctggaatccacactcctacctgtctcacccatctctcccccagagtctatcttggcagtcctgcatctatgcaatcaactgagttagaacatagcaagtccagctgactccttcccacaagagaggccctggccctgttactaacccctaagagtccatttccttatctacacattaagggagaataatccctgtttcataggattgctgtggggatgctggctggagataatgcatgtaaactagaaagtatgcgtcgggaagggaggaacctgtcctctctggctcctgctgtttctctatcacccaggatggcggccagcacatagatgcatgataaatattggttaaatcaacaaatggaagtgccccacaaagtaatcagttaataagaggcagctatgttggtttcccagggctaccataacaaaggattacaaactgggtggcttaaaacaacagaaagctattctctcacaggcctggagactagaggctggaaaccaagatgttagcaggggcagctccttgtgaggactgtgagagagaatcggtcccaggctgctctcccagctctggtgatggcgggcaatccttggccttccttggcccgtagatgcatcacccccatctctaccttcattcttccatatgtctgtgtccaaattttcctcttttcataaggatgccagttacattagatgagagcctaccctaatgacctcaacttgatgacatctgtaaagatcttatttccaaaaaaaaggtcaccttcacaggtactgggggtcaggactgcaacttatcttttggatggtacacaattgaatccataacactggctattgttcttttcacattatagtcctgattcccaacattttgtcctgttttgtcaactgtcatttaaaaatgttgcagaaatatcagtatttctgcacctaacccatttcatcctctcttccttttgtacttgaaattaaattccacatcctggctgggcgtggtggctcacgcccgtaatcccagcactttgggaggccaaggcgggtggatcacaaggtcaagagatcaagaccatcctggcctacgtggtgaaaacccgcctctactaaaaatacaaaaattagctgggtgtggtggtgcgcacctatagtcccagctactcgggaggctgaggcaggaaaattgcttgaaaccgggaggcagaggttgcagtgagccaagatagcgccactgcactccagcctggcaacaaagcgagactccatctcaaaaaaaaaaaaaaaaaaaaatccaccacatcctatcaaactacttgggctattggggtccagaaaggaaagctgtacagagagtccaagagaatgctgttcatatagtagaaacacagtaaatgccactaagctgctgtgtgaccttggacaagttactccacctctctcagcctcagttttcttaactgttagataaaggcattggatctcactgacatctccctgcacacacacagggaataggcaagattcccttttagaattctggtaggtagatgagatggatcgtttccctggacatgcagaaacctggtgccactgactcctacctctctcttcacttctgtgtaccctgagatgaagccctctccctctgaggctcctcatctgtaaaatcagagggtggaatgttctgatctcccaagcccgcagccatagaggaggctgtcactgctccccatcatctctgagcagtggatgaagcctatagaagagaggcagcctccgatgagctcattgtccccattctttggttggctggctggaaatgggaatgttcagtacattttgggcacctccttcattcctgaggctcaggtggtagcctatgccccaacattaatgaagcagcagttatattacccccagcccagcacctgccagaatatagcccaggtgttgccaaatagcagggtagggagaaactgtccggacaggggggttgccgagagacagcaaagccaacgcctcacccaagttcacaaaagcccagattaaaccaatgaacagctggaatttctaacttggacagccccaggattgtgcctgcctatacctggtactgaatacgtgagccttcttgctccttcttggacacaccctgtcatggttccagatacccactgctgtgattttgagcttctttgttacactgaaaatcctaagagcagaggtatagtctgattatttctgaacctaaaacctagcacaatgccaggcacaaagaaagaagagaaggaagtcaggaaggcaataaggaaagtaggaaggatggaagaggaaggaagaaagggagggagggaaagagggagactgcaacagaatatcacagtggctaatggtgcaagccgtaaagtgcaaaagaactgagttcaaactctggttttgccattgactggctttgtgacccaaggcaaatcgcttaacctctctgaattccaacgtcctgtactattcactccaccgggttgttgtgggaattaaataattcacttagaacacttagcatagtgcttgcccatggtaagcattcggcaaactgtggtagtaatctgcgtcatcatttatagtacttaaaacaataataaccgcatggactacacagccctctgacatcacctgcccagccaacttttccgtactttgggggcgggcggtggggtggtgggggagacaccgggaacggagggtaggaatgagcatttgcacaacgttacacagggatggtcccgctgactcaggagcattccactttgtggcagcgatctcagagtggcctgcaggccaaatcagatttgccagagcccctttgagataggggtgtcccgggctaccgcctctgacctggttctcttggcaggtggcgccacctgctggctgctctaggaactgtcttacatacctagtcactcagcggcaaaatgttctttgtgtcaagccctggactcctataatcacctcctgactgccaaagccaccttgatcctgggaagccagtcacgcaattcatactgccctgcagtcgtccgcttcacgtcagaatttccaggacaactcccaatttcctgaggattataaatcaaccataaaatttcattttcccctgagactttgcatatatcgaccagctagtctgtttctattctcttctgctttttttttttgcgggggcgggggcggcggggaatggagtctcactctgtcacccaggctggagtgcagtggctcaatctcggctcactgcaacctccgccgcccgggttcaagcgattctcctgcctcagaagtagctgggattacaggcgcctaccaccgcgtccagctaattttttttttttttttttttttttttttggtatttttagtagagatggagtttcgccttcttggtcagtctggtctcgaactcctgacctcgtgatccacccgcctcggcctcccgaagtgctgggattacaggcgtgagccactatgcccggccttctcttctacttctattcgtgacagaagaaacctcgtttctttcctttttcaggtgcattctgggttgctgtggagcttaggtcagaccttgagtttagagtcaaaggtcctgagttccagtctcagcccaccaaatacttttgcccaggtccctaatctctcccacctccagctgctttatctggaaaaggagagttatcattccacctgccatcatggtcctgatccttttgtgggtttgtttgttttttgtttttgttttgattgttgttgttattgtttttgagacagagtctcactctgtcacccaggctggagtgccttggcacaatctcggctcagttcaacctctgcctcctggattcaagcaattctcatgcctcagcctctcaagtagcagggattacaggtgcacaacaccactccccgctaatttttgtattttagtagagacagtgtttcgccatgttggccaggctggtctcaaactcctaacctcaggtgatccgctaggctcagcctcccaaagtgctggattacaggcgtgagccaccatgcctggcctggttctgatccctttgaaatttaaaggagaatgaaatcagtgggaaaaggctttgttagtgtcacagataaggctacaactccttagcctgtgggtgtaactactgtcacgtgtaaatacagaatcctgggtgacggtggcatgcattggccctgccttcttcctcaccagcagtctctcagtatgacattgtcatggtagctactataaggctggcacaggtttcggttttattatggtcattcatgagatttttaatgagggcttactatgcaccaagcactatgggagttcaaatatcagagccaaaattcttggactctgggacctggaggtctagaagggatgaagtgtaaacaaatccacacactggtccatccctgttacatgccaagcactgtgctgggcacgtgatggatgtcaaccgtaggtcaaacaggaaggactcacgaagtacagttacaaatgcagctttggtttgatagggccctctcccaagatccctttcaacttgctcagtgggtggtagacattcttcccagcccctgggcgaaaacatggagggtcccatgatttttctgatcacttgcaggaaactaaaaacgtcacactcgttttaagccacaaaacagtatcaactcaggaaatagaatgtccagttgatatattattcaacatatcaaccctcactttctcccctgcccaggtagggccaagcacctagcaaggatgctgaagtcagttccgtctctctttcctgctattctcctcactcccacttccctgtggctgtttctagcccagttgaaatctaagcaggacaaagggacgggaaagggaaagggaaagggaagggaagggaagaagggaagggaagggaaataaagaagggaagggaaataaagaagggaaaggaagggaagggaatggaaataaacaagggaagggaaggcaagggaaataagagaaaggacggcaagggaaggctagggaaggcaagggaagggaggggagggnnnnnnnnnnnnnnnnnnnnnnnnnnnnnnnnnnnnnnnnnnnnnnnnnnnnnnnnnnnnnnnnnnnnnnnnnnnnnnnnnnnnnnnnnnnnnnnnnnnnnnnnnnnnnnnnnnnnnnnnnnnnnnnnnnnnnnnnnnnnnnnnnnnnnnnnnnnnnnnnnnnnnnnnnnnnnnnnnnnnnnnnnnnaggggaaggcagggcagggaagggcagggcagggcagggaaaggaagggaagggaaggaaagggaaagaaagggaaggaaagggaaggaaagggaagggaagggaaaaagctcttccttgtcagatattgttttaagttagtgtcacagcatctgggtccggctaacattaaagtcagattctttctcttggggacacttttctggattcctcttagactcccctcttggagcatctgcaggcacaagccccttcttcagttgaccgcctgtgacccctcccccaagtttctgcctctgcagtatggcccactggcatcccctcaccctcgcaggctgccctcccaaatgccccctgctgacgtgcctgtcaagggctccacacctcccaaagatggaagcacctgtcaggcattgtaagaggagtgcagtgactttgcagtcatctcagctcagacaactgagcatccctttatacatacatctcttttaatcatcttgaaatccaggaaagaaagctcccttatcccttttctacaaatagacttttagagaattacacaatcactaagtgacaaagatgaggtttgagccctgtctctccaagtcaaatcccacgatattcccatgagtccttgctgttggattccaaaaagcaaagggtccactctggggcctgggacaagccatcaaacttccatcttgattcttcatctttcatgatttccaagagctcttcacattctaaaactctataataaaatttctgagttgaggaagcctagaagcacatggcagagaattctgcggaggcctccctcttctgcgtgggaggaagtccccacagctcagctcttcctaagagctctctgccctgacaccctacgtgatatgggcatgtgcctccagcaagtacagggcagagagagagaaacatcatttaagtggtgctggcattaagtggtgatgacatagcctcatgtccagtactgagtgggagatggaaagcatgcatttgcttcctttccagacaggctggctcatttcccctgtgcctctcatgatgagaggattatgcatgctgagtatgatgctggtgattcaagtgaggaagtttccagataccatgcatgactcctggtttaagccaattatctcatcatggttcaaccaaagaaacaataatttattcaaatgctggagaaaactcccagccatgctggttttattgattctgggtctccaagatggtgcccttctaaagaatttccaaggatcattttgtgcaattgcaatgttctccttagaccttcgtcaccattggtgggacttcagtgcttagcagctcaaggaacccagcatgttctccgtagctgtatcctctagatcctcacagcctccctttagaataagcagaacaggtgtcattacctcctttttacagataaagaaactgaagctcagcagtgataaatacgatgtctggtgaaaagcagagccaggacttgaaccttggtttcccaatccaagcctaacactttgagtcctataccttctttttgctgatgttcacacaagatcaagtgagcatttccctgcccttcctaatcctctacttaccagaatcccacctccctgctcctcagccagcttggggttggagaatggggtggcatttcaggcagtgtaaggttgaggattctttcatgattcttccagtaggacatcagacacatccatcctggcaacaacacactaaactgtccattacgtcccactggaatcaattgaggttatgtttctgacaacagagaatagtttgttcccttcgttacattagcctgggccaaggggtaaagcatatctatccctttattgcccgtaagtgtcccttagttccagtggagattaagaaaactggaatttattgagcacatactatatgccagaatttgttctgagggttttgcacatcttaaatcatttaacctcacaaaaaccctatgaggccattccttgtatgattcctttttatagatgaggaaactgatacacagcaccagttaaataacttttccaagattcacaggttgaagtgatagagacaaaacctttaacgtgggtagttggattccagagtctgtatgcccgggtccactctcgacagactaaagctcaaaacagtttgaccttgaggttttccaggaggaaaagcatgaggctgaggagaacacttatgttagattggattcctgagacgcaaagcccaagcctagggttctcttgtgggccacgtagtatggaagtgctcctggagaaacccgcaagaggcagggaggcaggacacggagggaagaccaagcaagggagccacctcagggctgccccacccccaagccagggcgctgggctttcatgcccccagctgtcagacagagccagtaagtcaagctctggggccctagggcactgctccacaaatgagccacagggcccagctgtggggagtgaatgcacatggaacgtggggacacaaaaaaatagttccaaaaaaaaaaagaggatgggtcagagcagtgacagtacctgctgcagcagccacgcctgggataggaaaggagcacctgtgatctgccgtaagcctcaacaggtcccacgcgaatttctgaggaacttagattcctctgatgttggcaagtgcccaggaaatatcttgtcagaggaaagtcggggataactgtctgtgcagggccaccttcgggtaaacacgcagggcctgttggagagccacctgggtgactgggactgcgtccacatgacctctgcagtcaccccgcccactgttccctaaggccacacttccataccgcctgccctcgctctgacctgccttctccatcaaacttgtcccagccagtctctccctgtgtctgtcagggtcccaagatgtatcagccactgtgctagttttcttttccaagttgattttatttatgcgatcgatctcattctgttcttaattatgaaatatttttaacacataaaaagccacctaatactcagcattgtcaactcagtgttatttgttaaaaaacctttttttaaaacctgaaatcaaagattttagatataattgaaactccccttgtactctgtcctgattgaattccacccccacccccccagaggtcactgctgccctaaatttggtgcttaccactcccatgaaagttttactacatatgtataaaacctttcctaggactattttgcattattttaaactttatgttaaattgtgttatactgtgtattagtcagggttctccagggaaacataaccatagaatgtgtacagagagagatttattttagggaattggctcacacagttatggaggctagaagtccaagatcaaagtgtcagcaggttgggaggcccagtgaagaggtgacactgcagttcaaggctgaaggctgtctgctggtggaatcctattttctcaggggacctcagtctttgctctgttaaatcccgcaactgattggatgagaatacccacattatggcacgcaggcaacctgctttactcaaagtccaccaatgtcaatgttagtctcatccaaaaacaccttcacggaaacatctagattgtttgaccatcacatattatttccatctgcaacttactttcttcacttattgtgtttttgagatttatctgtgttgacaaatctatcatttcattgtatatgaggggacttcaaaatgttcctggaaaaaaaatggaattaagagataaaaatacaaaatgtaaactttttttttttttattatactttaagttttagggtacatgtgcacaatatgcaggttagttacatatgtatacatgtgccatgttggtgtgctgcacccattaactcgtcatttagcattaggtatatctcctaatgctatccctccccactacccccaccccacaacagtccccggtgcgtgatgttccccttcctgtgtccatgtgttctcattgttcaattcccacctatgagtgagaacatgcggtgtttggttttttgtccttgtgatagtttgctgagaatgatggtttccagtttcatccatgtccctacaaaggacatgaactcatccttttttatggctgcatagtattccatagtgtatatgtgccacattttcttaatccagtctatcattgttggacatttgggttggttccaagtctttgctattgtgaatagtgccgtaataaacatacgtgtgcatgtgtctttatagcagcatgatttataatcctttgggtatatacccagtaacgggatggctgggtcaaatggtatttctagttctagatccctgaggaatcgccacactgacttccacaatggttgaactagtttacagtcccaccaacagtgtaaaagtgttcctatttctccacatcctctccagcacctgttgtttcctgactttttaatgatcgccattctaactggtgtgagatggtatctcattgtggttttgatttgcatttctctgattttcttctgcaatgccgcttgaccccaatacacactcgacagtagttccaaatagccagaaaacggcactttcaatttttccaccctacaagatctaaataattcttgtcataaaatgggcaaatggtctgaggtgcctgatgtccaggcattcttttacgcatcggtccctctctagtctctgttcccaatgcaactcatcccaaatcttccttctttccctcccgcctgtcccctcagtcccaaccccaagcgtcgctgagtctttctaatcttccttttctacagacccatctgacctctcccctcctcaccaggccgagctaggtcccaattcttcctcagcctccgctcctccaccctggtccgctccttttatcacctcccctcctcacacctggtccggcttatggtttcattccgtgactagccctcccccacctgcccagcaatttactcttaaaaaggtggctggagctgaaggcatagtcaaggttaatgctcctttttctttaccccaaatcagatagcgtttaggctctttttcatcaaatataaaaaacccagcccagttcatggttcgttcggcagcaaccctgagacgctttacagccctagaccctaaaaggtcaaaaggccgtcttattctcaatatacattttattacccaatctgctcctgacattaaataaaactccaaaaattaaattccggccctcaaaccccacaacaggatttaattaacctcgccttccaggtgtacaataatagaaaaaagttgcaattccttgcctccactctgagacaaatcccagccacatctccagcacacaagaacttccaaacacctgaaccgcagcagccaggcgttcctccagaacctcctcccccagaagcttgcttcaagtgccagaaatctgaccaccaggccaaggaatgcctgcagcccaggattcctcctaagccgtgtcccatctgtgcgggaccccactggaaatcggactgttcaactcacctggcagccactcccagagcccctggaactctggcccgaggctctctgactgactccttcttggcttagcggctgaagactgatgctgcccgatcacctcagaagccccgcagaccatcacggacgccgagctttaggtaactctcacagtggagggtaagtccatccccttcttatcaatacgaggctacccactccacattaccttcttttcaagggtctatttcccttgcctccataactgttgtgggtattgacagccaggcttctaaacctcttaaaactccccaactctggtgccaacttagacaatacccttttaagcactcctttttagttatccccacctgccccgttcccttattaggccgagacactttaaattatctgcttccctgactattcctggattacagccgcatctcattgccgcccttctccccaacccaaagcctcctttgcgtcttcctctcatatccccccaccttaacccacaagtatggaacatctctactccttccctggcaaccgatcacatgcccatcaccatcccattaaaacctaatcacccttacccctctcaacgccaatgtcccatcccacagcacgctttaaagggattaaagcctgttatcactcgcctgctacagcatgggcttctaaaacctataaactctccttacaattcccccattttacctgtccaaaaaccgcacaagtcttacagattagttcaggatctgcgccttatcaaccaaattgttttgcctatccgccctgtggtgcccaaccggtacaccctttcgtcctcaataccttcctccacaactcactattccgttcttgatcttaaagatgcttttttcactattcccctgcacccctcgtcccagcctctctctgctttcacctggactgacgctgacacccatcagtcccagcagcttacctgggctgtgctgccacaaggtttcagggacagctctcattacttcagccaagctctttctcatgatttactttctttccacccctctgcttctcaccttattcaatatattgatgatcttcttctttgtagcccctcctttgaatcttctcaacaagacacacctctgctccttcagcatttattctccaaaggatatcgagtatccccctccaaagctcaaatttcttctccatcggttacctacctcggcataattcttcataaaaacacacgtgctctccctgccgatcgtgtccgactaatctctcaaaccccagcaccttctacaaaacaacaactcctttccttcctaggcatggttagcgcggtcagaattcttacacaagagccaggaccacatcctgcagcctttctgtccaaacaacttgaccttactgttttagcctagccctcatgtccgcgtgcagcggctgccgctgctttaatacttttagaggccctcaaaatcacaaactatgctcaactcactctctacatttctcataacttccaaaatcgattttcttcctcatacctgacacatatactttctgctccccggcaccttcagctgtactcactctttgttaagtcccacaattactattgttcctggccaggacttcaatctggcctcccacattattcctgataccacacctgacccccatgactgtatctctctgatccacctgacattcatcccatttccccatatttgcttctttcctgttcctcaccctgatcacacttagttttttgatggcagttccaccaggcctaatcgccacacaccagcaaaggcaggctatgctatagtacaagccactagcctgcctcttaagaacctctcatttcctttccattgtggaaatctatcctcaaggaaataacttctcagtgttccatctgctgttctactactcatcagggattattcaggccccctccctttcctacacatcaagctcgaggatttgcccccacccaggactggcaaattagctttactcaaagccccgagtcagataactaaactacctcttagtctaggtagacactttcactggataggtagagtcctttcctacagggtctgagaaggccaccgcagtcatttcttcccttctgtcagacataattcctcagtttagccttcccacctctatacattctgataacagaccagcctttattagtcaaatcagccaagcattttttcaggctcttagtattcagtgacagactagcggtctattaaaaacacagctcaccaagctcagccagcaacttaaaaaggactgaacaatacttttaccactttcgcttctcagaattcaggcctgtcctcggaatgctacaaggtacagcccatttaagctcccgtatagacgctcctttttattaggccccagtctctttccagacaccagaccaacttagactgtgccccaaaaaacttgtcatccctatcttctgtctaatcatactcctattcaccgttctcaactactcatannnnnnnnnnnnnnnnnnnnnnnnnnnnnnnnnnnnnnnnnnnnnnnnnnnnnnnnnnnnnnnnnnnnnnnnnnnnnnnnnnnnnnnnnnnnnnnnnnnnnnnnnnnnnnnnnnnnnnnnnnnnnnnnnnnnnnnnnnnnnnnnnnnnnnnnnnnnnnnnnnnnnnnnnnnnnnnnnnnnnnnnnnnnnnnnnnnnnnnnnnnnnnnnnnnnnnnnnnnnnnnnnnnnncgcatgccgggcgaagaaagcctgatcttagggctgttaagcaccttacaccgacctggaccctgggtagagttgtaacaagccgacaccacgcatgcccttgacccacagcaggtcgtaacttccatgcttaaatgtctgcccacctctaggcggcccacgccgtcactaatcccgcgtagaagccgcctgggaaacatgcggcccattctagtctcgtccactaccagcccccctaaaaattttctgtcgccccaacacttcaacaccattttatttttcttattaatataagaaggcaggaatgtcaggcctctgagcccaagccaagccatcgcaacccctgtgacttgcatgtatatgcccagatggcctgaagtaactgaagaatcacaaaagaagtgaatatgccctgccccaccttaactgatgatattccaccacaaaacaagtgtaaatggccggtccttgccttaagtgatgacattaccttgtgaaagtccttttcctggctcatcctggctcaaaaagctaccccactgagcaccttgtgacccccactcctgcccaccagagaacaaaccccctttgactgtaattttcctttacctgcccaaatcttataaaacggccccacccctatctcccttcgctgactcttttcggactcagcccacctgcacccaggtgaaataaacagctccatcaagttcaagacacttttgtaagcaatgatagcagccatttagttcatccctaaagaactgagggccttgggaatttagcaatgttagtgcagtcttttcacattattaactgaagaaaaatgagtgccctttaaagattttttaagattaggaaacaaaaagaagccagaaggagccaaatcaggactgtaaggtggacgcctaatgattttctactgaaactcttgcaaaattgccattattcaataagaggaatgggcagaagcatttgtcatgatggaggactctctagtgaagctttctcaggtgtttttctgctaatgctttagctaactctcaaaacactcttataataagcagatgttgtcattttttgccctccagaaagtcaacaagcaaaatgccctgagcatcacaaactgttgccatgacctttgctcttgacctgtctctctttgctatgaccggaccccttccatcatttgctagccatttctttgattgtgctttgtcttcaggattgtactggtaaagctatgtttcatctcttgttacaattccttgaagaaatgcttcagaatcttggtctcacatgtttaaaatttccattgaaaactctgctcttgtctgcggctgagctgggcaaaacagtgttggcacccattaagtggaaagttcgcttaactttaatttttcggtcagaattgtgtaagctgaaccaatggatatgtttatggtgtcagctattctttctgcgatcaataattggtcctcttcaattagggcatgtacaagatgaatttttcccttgcaaattgtctgctgctatggccttcgtcttcaacatcattttattctttcttaaatgaattatccatttgtaaactgctgatttctttagggcattgtccccataaacttttcataaagctcccatgatttcattatttttctactcaagcttcaccacaaatttgatgttttctcttgctttaattttttctgaattcatgttgctatgataggggctctttccaaactgatgtcttatacttcttagtgcctcttatatctgattctgaactattctgttcagatataagaacttagtatgagtttattttggtgcaaaaaaatttgaaatttaggctgggcacgatggcttatgtctgtaatctcagcacttttggaggccgaggcaggtggatcacttgaggccattgctactaaaaatacaaaaaattagctgagtgcagtgtcgtgtgcctgtagtcccagctactgggtagactgaggcacaagaataccttgaacccaggaggtggagcttgcagtgagccaagttctctttgctgcactccagccagggtgacagagagagactctgtctcaaaaaaaaaaaaaaaaaaaaatctatgtattgttttttcataatacacatttttttccatgaatttattgaaggttccttgtctatatgataggttatgactttttctgttgataggcataggttgcttccaatttttctatcacaaacaagagagagcataagctctctctagtgaggaactgccatggcataatacataacaagtgcttaaaaagcatttgggtttgacttgtttggcttactatgcacctggtactgtcaagacaaagcagctcaattttattttttattattatactttaagttctagggtacctgtgcacaacgtgcaggtttgttacatatgtacacatgtgccatgttggtgtgctgcacccattaacttgtcatttacattaggtatatctcctaatgctatccctccccgcttcccccaccccactacaggccctggtgtgtgatgttccccatcctgtgtccaagtgtcctcattgttcagttaccacctatgagtgagaacatgtggtgtttggttttctgtccttgcaatagtttgctgagaatgatggtttccagtttcatccatgtccctacaaaggacatgaactcatccttttttatggctgcatagtattccatagtgtatatgtgccacattttcttaatccagtctatcattgttggacatttgggttggttccaagtctttgctattgtgaatagtgccacaataaacatacgtgtgcatgtgtctttatagcagcatgatttataatcctttgggtatatatccagtaatgggatggctgggtcaaatggtatttctagttctagatccttgaggaattgccacactgtcttccacaatggttgaactaggcaaagcagctcaattttataagaaaaggaactgagggctgggcacagtggttcacacctgtaatcccagcactttgggaggccaaggaggcagatcacctgaggttggaagttcgagaccagcctgaccgacatggagaaaccctgtctctactaaaaatacaaaattagccgggcatggtggcacatacctgtaatcccagctacccaggaggctgaggcaggagaattgcttgaacccaggaggtggaggttgcggcgagccgagatcacgccattgcactccagcctgggcaacaagagcgaaactcagtctcaaaaaacaaaacaaacaaacaaaaaccaaaaaaatgaaaacaaacgaaaggaaggaaagaaggaaggaaggaaggagaagaaagaaaaaagaaagaagaaagagaaaaagaaagaagagagagagaaaggaagaaagaaagaaagaaagaaaaagaaagaaaaaggaactgagctatttaacattagaaccatgattcaaacatgggggtaatggaagatggctgagcatgggttttacaggcctgccctggagagggagcaccgtgaaaaataatcaaatagctggcattattctgcaggcctgagaatgctcagtggggaagcaaaacaatgatttggctacccgcccatagcttctgacagccaggggcacctacatcgtaattcttagcagaaaggacctatatttcacagaagcatcagcagagtagcatagtaattaaactgattttttgtcttccgttttgaccttagaaaataaaacatctgagattataagagagaaagtgtgagtatgaggaggaaactgtctatagttgatacaagaaatagagttctattatttaaagtgatcaaaacagccagtaaagggaaagggaggtggagggtgagtaagttaaatattcatttgtcagctagaagtcagtaaacgatgtctgtggcagataacttgagcaatcaagaaatatgtgggcaggctctggatgaaagaaacagtaaggccaggcacggtggctcatgcctttaatcccagcactttgggaggccaaggcaggcggatcacctgaggttgggagttcgagaccagcctggccaacatggtgaaaccccatctctactaaaaatacaaaattacaaaaattagctgggtgtggtggcacatgcctttaatcccagctactcaggaggctgaggcaggagaatctctggaacctgggaggcagaggttgcagtgagctgagatcacaccactgcactccagcctgggtggcagagtgggactccatctcagaaacaaaacaaaaaaagaaaaaagaaaaggtgaaagtgctgacagcagggtgcggggagaggaaagtgtgggtcagggaaatgttggtctctagaaggtcttcagtgctgtttaactttttaaatcaggtgataattaaattatcacttgaataattttaaaattaaaatagaagaactacaaaatagagcaaggactactgaaatatttacagattttccaagtgatatatgcataatagcctcccagatggggtggaagctggtaggtagagattgtaaaatttagccatgatacttcaattgctgaagtggagggatgggggggtcattattctagactctttctacctttatatatagttatacatagttgaaatttcccatagttaaaaggatattttttaaaacaagcacagtctgtgaggtcagacaggtgtgagttaagttctagctgagccacttagcaatgtgggcaagttacttaaactctctgagactgagtttcctcatcacataatggaagtaactgctgttcacccacttagtgtgaccacttacttcagatgtagggatgaaatgagattatgcctgtgaagggctgactgtggcataagtgtagtaagtgctttaaaaaatattttggtttggtctgttttgttgcttctatgcggggtttttataaagaaggtttggctgtaaaatgtgaattctgcttctcaggcatcttatatttgttctgtacctctattttctgccttatgtgtttgctgttgtttagtgttatatttctctcctcagctagcttgcttagtctattctgttaacaaacatttattgagcacctatgtgccaggcactgaactgggtgctaaggaagcagagatgagagactgtccctgatccaaggtcacacaaatcagtgatggagaaaggcaggaaaagatcagaataacatgcagcataaaaactgcagagattgatataccacagtgagtatggggagtactgaggatacctagcacagcctgagccagggtttgaaggatggataggagttcaccagacaaaggaaagtaggaggcagtctgccatgacatgccgaggtagcagcaggagtcaaggtctagaagctagaaaggcctgagtctgttcagaaaagtaactcagttcatggttggggagtgagggaaaaataaaactagactgaagagcaaggtccaaattgtgccccaggctacagacttcataggacaaggggacatgggaaggttcattccggagcacagcttcaaataaaacatgagttcaaaacatgagttccaatctgcatctgagtaagttcattccagtagaaagggagagggtgagaggttagaaagcagagacagacagagagagagagagagaaagcaatgtcacagagggagtataagtccattttcctactgctatgaagaaatacctgagactgggtaattcataaagaaaaaaggtttaatgaacccacagttccccacggctggggaggcctcacaatcatggcagaaggcaaaggaggagcaaaggcacatcttacatggtggcaggcaagagaccatgtgcaggggaacttccctttataaagccatcagattgtgtgagacttactatcttactatcatgagaatagcacgggaaaacctacccccatgattcaattatctcccaccaggtccctcccacaacacgtggggattatgggagctacaattcaagatgagatttgggtggggatacaaccaaccatatcagcaggagatgctggctgtctaaatagatccccgtcagaatcactgtatctggatgtgcctggggctcaaaatttgattttgttggggcatctggagaaaattaagccctaaagggctgtctcacaacaaactcatctgacataaacaaccaggactgtgttataaatggtagggtttaaaccctatatatggtaggggttaaacctctttagtgaccagcactgatgcctactatccaaagcaagccctcgtatttctgaggttgctggaggtggaagtctaggtgggcccagaatcagaacttggggggacagagaggcttccagggaaagaggagcctaaaacactttgtcctcagcatgacagacttctaggggccaaggtgatcctgtttgcccaacaatggcaaataaaccccggccagcagttctagcttctcactgcatgctcatctggcccctctacaatgacgttccttcccagccacagcatagtctgatgaagtcagggtttatttacagtacaggctcagaagtgtattgtggcttccagagtgaaatccaaccttagccctcagatgtctctcattctccttggacacccagtggctgtgactgtgcttgtgagtgaactgtctcaagagatggctagacttctccattacttgaagacatttcccctaaattcactttcagatgcaatctttttttttttttttttttgagggagttttgctcttgttgcccaggctagagtgcaatggcgccatctcggctcactgcaacctccgcctcccaggttcaagcaattctcctgcctcaacctcctgagtagctgggattacaggcacacccacgccgggctaatttttgtatttttagtagagactgggttttgccatgttggccaggctggtctcgaactcctgacctcaggtgatccgtctgcctgggcctcccaaagtgctaggattatacttcgtaatcccctgagccactggtgtgagcccctgcactcggcctcagatgcaatcttaactcactgtgcttgggcttcttagtttttgtccccaggtaacaactatcaggttaaaccagaaaagagatgattaggacttgaaccaagctggataatggagtgggaatggatttgggcacatctacttggggaattgttggtttttgacttgggggatgaggaagagagagatgtttaaggtgattctcaggttggagctaggtaagaacctggctgttccctgagggtaggcactgggtcttccctgcttgggttctccataaagaggtagcactactgctgggctcattaattcaactaatacctgctgtaccagacactgtgctagggatggaacaacaaacaggacagaaaggcagtgcctgacttccaggaggttatattctagcagaaaatacagataaaataatttaaaaaccataaaattgataatacaagctttggtaagtgttttaaagaaaactaacaaagcagaaaggggcagagtaaagggaagcactgctcgcagtaaggtgaccagaatgagggagctattcatgcaaaggggaagggaggagtgggccaggcaggggagtcggcaagtgctagggccttgagcaggagagggactggtatggtccagaaagaccaagacccacatggctggagcctttggagcaatggaagagtaacaagcatgcagggccttgaagcccacttcagaagactgggttttactctaagtataagagacacttctatagagttttgttttgttttgtgtgttgtttttgttctgagatgggctttcactttcactctgtctctcaggctggagtgcagtggtgcaatcatagctcactgcagcctcgacctcctggcctcaagagatcctcccacatcagtctcccaagtagctggactgtgggtgcacatcatgacacctggataaattctgtttttttgttttgttttgttttttggagagatagggttttgctatgttgcccaggctggtctcaaacttctaggctcaagcaatccacccaccctgtcctcccaaagtgctgggcttataggcgtgaaccaccacacctagcccctctgaagagttttaatttagtttaatcagagtgacatgatatgattttaagagtttaaaaagcccactctggaagcaggatgcagaatgcattggaggagggaggtacagatcagggagttggaaggatattacaatgggatattataatgggataggagagcatgatggggacttgcactagggtgatgtcaagagaggtagagagaaataaatggatttgagatacattgtgggggtagaattgactagactcagtgataaatgagatgtgggagatgacagaaagtgagagatcaagatgatcccttggtttccgggtagacattggggttgtttactgagatgaagaggatcaaggggtggtggggaaagggaagatttgtggggaaattatctagattttcttttttttttttttaatggattttcactcttgttgcccaggctggagtgcagtggtgcgatctcagctcactgctacctctgcctcctgggttcaagccatgatcctgcctcagcctcctaaatagctggaattacaggtgcgtgcaaccacgcccagctaattttttgtatttttagtagaggcaggggtttcactatgttggccaggctggtctggaacaactgacctcaggtaatccacccacctcagcctcccaaagtgctgggattccaggcgtgagccaccgcacccggccaaaattatctagattttcattcggggacatgttaagtttgagatgtctgagaaatagccaagtgaagacctcaaagagagggtgagtatgcaagtgtggagctgagcagaaagttctgagatagacatttaaatgtgaaagtcattagcacatacaatgccatttaaatctgtgtggatagatcagaccatttagtgattaaaaaaaagaagcaccaagacccaatcttgaaaaactttaacatttagaggtcagataaggaagaaaaacctggtgaagcagagaataataagaaagaatggtcaatgaagtaggaggaagtccagagagagtggtgtcatggaagccgagacagaaaagtacatctgtgacaaatgcaaccagcaggtcaatatgagcacagagaagcatctgccgggcttggtaatacggtggccttgttattaagagcagtatcactggggtgctagggactgagaattatttctcattcctttattgctagaagcaagttatgctgaacatccatcctaaacttgaaagtcaaataaatgtgggaagggtttccaagggaatcttgcatcttgccactgcaccagctgagtttaatttcccaggagctcagtcttacccacctcctccccacacctgcagctctagctgccagaatgccaatatctttactccaaacaaaccattcattgtacccttgggcccaaatgataaccttttttaaaacgctgcttgtatttgcctttcctttaacacaatgatggtcaaatctctcatccaccaccaccagctcatttattttaataactacatccgcagtgaaaacaggagtagtattatagaaagagataaagtcctcaccatcatggtacaaatgactaggacttttcagatgactatggacaggaaaaacaaaggaaaaaaatatatatgtatatatatacatatatatatatcaagccactagatggaagtcttcattcaactgcctgtgcacttcagaaaagtaaagcaggatcagtgccagactgcacaaacccatcaaattcattcgacattcattgaacaactgctttgtacaaagacaaataacaatgatgataatggctaccgttcatgcaatatttactctgtgccaggcaatctgctgagtcacacatacgctgagtctcacacaccttggctcatttaattctcccaggaggaagggagtattattatcttcattttatgggggaggaaaccaaatcttagaattacttactctaagcaactgacccatgcttgtgaatggaggagccagtttccagaataagaaaacactgtcgttgtctacaaagtatttatactaaatgtggtaagagagggataatgtgccacaggggtgggctgtgactcagatgcaggaaccagccaatgagggaggaagagaatcagcaaaggccccaccatgctctctacagctcaggatgaaacggagcggtcacccctaattgttttccctcactctccccataactactgcaccacaaagaaccgactgttctatcccccaaatgcatcttaaactagtccacatttttccacctaccctatgatcacatcgttcgtccaggccaccatcattaataaaatgggctccctggaccaccgcaagagcctcccgactggttctttggcatcttctcctgcctcctccaatcctctcttcccacagtagtcagagggtccacttagtgcacagatcacctctgtaacctgctcaagccctttcaaaggcttcccagtaaatctcaactcctttccattgtgcccaaggccttccctctatggtctggtcttgtctacctttttaacctcatctcctacagtagcggctggtttctcaacaaacaggacagagcctggcataaacagtaattatgtgctgaagaaattaaggcaagaatgaatgagtgaataaatagaaaagtttcatggggaagccgtgtttgaaatgagcattatactggagcaggctttctcagactgagggctgggagtggggaggtagtgaaacaagttgctctcaatggaggcagcaggtgcaaaggcacagagggattccaggtgcagcagggaggcagctagagcaggcctgggggcagggccatgtgaaaccggggttctcaaggttgagtatgcatcataagcccctggaaagcttgctgagacacaaattgttgggacccacctgcagagattctgataggtccatctgaaacaggagctgaaaagtgcatttctcacaagttcccaggtgatgctgctgccactggtccagggcccacactttgagaaccactagtgcaaagtacagtcagtccttcacatccatgggttccacatccatggattcaaccaactgtagatcaaaatattttttaaaaaatagatgattgcgtttatactgaacatgtgggcttttttcttgtcattattttctaaataacacaataaataacaactatgtacatagcatttccattgtattgggtatcataagtaatcttgagatgatttaaagtatatggaaggatgtgtgtgtaggttatatgcaaatactacatcattttatataagagacttgagcatccgtgggggactggaaccaagaccccatagataccaaaggacaactgtacataggttttctataagctttaattttggagggtaggaattgttaccttaaaagaaggatataaatcactattttaagccaatattagtcctttgatacttaaatgtgaatgagttgcaagttctttatcaaccagaaggagaactccaggcaccagaggtgagagacaggagtgattaagaactgggaaagggagacaccctagtctgcctgctccccagtgtgccccaggccaagctggaacagaaatgattagctttgctagtggggaattcaatgaaaatggcagggtttggtggcttacacctgtaaccccaggactctgggaggccaagatgggtggataatttgaggtcaggagttcgagaccagcctggccaacatggtgaaaccccatctctattaaaaatacaaaaattagctgggcgcagtggcacatgcctgtaatcccagctactcaggaggctgaggcacgagaatatcttgaatctgggaggcagaggttgcagtgagcagatattgtgccactgcactccagcctgggcaacaaagcaagactctgtctcaaagaaaaaacaaaaaaagtaattcaatgaaatgaaacaaaataagacagccacactggagcaaggggaaagcagttattttcttctcccatagctgggatttggctccaccctgcaggctccccctatcagagccttcagctcaccatttatatatatatatatatatatatatatatatatatatatatatatatatatatatatatatatatatatataaaggagtttcttgggttgaagggaggacaccctctcattccctacctgtgggagatcctgagaggcttggggattcaagtttgaaaaaccactcctcaaggctccatgaaacccctaaactatatccacaatgtttatgttcacgtgtatgttttgggggagacgaaactctagagccacgctgcccaatacggtagccacgggtggccaccatgctggacagtgcagacagagcatttccaccgtcacaggaagctctctcagcactcatctagagctttcaccagccttccaaaggcatccatgaccagaaattttaagagctgctaggcaaagccagtgaaacttcatctaaggagccggactctgccctggagagatgaaagcttgtcactgtgacagaggctatgaacaagtctgcctttgaatagtctttttgtgccaaaaatcccactctaaaaactcttagaagatatccagattttatgccttattatttatatccccccaccctgaccattgtccaaagagagggacatcttaattccacaaatatttgctgtaagaaaggttctctgaggtcccccagagcctctgtgcctaacacaagtcatggtggtaagtgatcttgacgctcccagtgaccttgtctcctttggtgtgtgtgatcgctctaggtgggtgaggcagtcttggaaaatgcccggctcatgctgcagacagaaactatccaggccggagcagatgactttaaagagaggtaatgtcttacagcagaggcgacagtccctccacatccctagactcctaggcaagtgtggataatgctgttctggagcctgcatcatccaccttctacctcaggggaagctggcaggataacagagccatgattatccagctcacacccctccttgtagacataaagtaggccccaagggctcaaagattttgcccactgtcagttggtttagagcagggttctcaaactctggaatgctcagaatcacccaggggccatatagaaaacagagattgctgcgccccaccctgttgaatttctgactcaatgggtctggagaagggccccaaatttatattcctaacaagttcccagggatgctgatcctgctggtcctgggactcaaatactttgagaactactagcttacagtaatgattctccaacctgggcatatcagaattacctgggcacttaaaaatgtcagtgcagtgcacaagccatagactaattaaatcagagtccccaggggttgggtccaggcttcagcagttttagagctcaccaggtgacttaatgtgcatccaggcttgagaaccgtgctcagctacacctcccactcagtccctgaaggcatctgggtttgcagccactctcctggagatggacacttttaacatgggtgctttggagacagaaaccacatttcttattttggggtccccaccctggtgcttagcaggttgtcagtaatgtttgttaaaggatccttggttgaaaaggaggacaatcaggatagcgatgaagatgccggatcccctaacctggatctgaactcctgagttttccctggagttctgtgttgcaacactcccatgaggctggtagcccgggaagccaggttatcagaagttggctgcaattgccttcattttaataaatcaatgtgtgacaactgcactaacagtgccctcaaatctattgaaacagtgacttttaccattcattgtctaactatcacataattggcctgttggtaacatttataatctgattctttttcttttgggctactcagttatgctaattaagttcctttatctgcagatatgaaaatgagcagccatttcgaaaggcagcagaagaggaaattaactctctgtataaagtcattgatgaggctaatttgactaaaatggacctggagagtcaaatagaaagtctgaaagaagaacttggctctctatcaagaaactatgaagaggtaggagggggctggggttgctgggttggccacaagaccagaagttcacatctgtctgcctgtgcttcataacaaggccacagtagctcatttctgactctccacattgcgtgcccaggactgcagggaacatacctgtaaaatactttcagatccttgaagtgggtcaggttaccccagcagtctcaaactcaaatagcttcaggaaccagtgtggtacagaaacaggggaaggcagccagtcttggcactagcaaatgagggaacttgtgttaaattagagggagcaacccctcctcaatgcattctatgtcaggtttttttttcaacactgtattatacaaacaaaacaactctgagggtagatccaagctgtggttgacatctactcattaacaaaactgggtcagattattgagtgacagaactgaagaggacctccaacagttatggggtctagttccctgcgagacttcagcaattctaaaccacctcacacatattactgtctgatccaagatttaggctgcttcaagttgaaagagtcaaaacccacttaacgatgctcacattgggaagttctttcttgagaccaacttaagctaaccagcaactgtaagcccatttcttcttgttcttagctcagtgatttaagactactctccaacagtaaccatttagagatgccaaagttatcttttaagtctctttcatccttgtctggctttatgcataaattccctgtgctgttgttgcttactttgtttttgtttttgtttttgttttattttactttaagttttagggtacatgtgcacaatgtgcaggttagttacatatgtatacatgtggttttttgtttgtttgtttgtttgtttgttttattttgatttctgctttgggcctgggcttgtggagaccaacctaagaaatgcatccttggtgctaggcatggtggttcaagcctgtaatcccagcactttgagaggccaaggcaggggatcacttgagcccaggagttcaagaccagcctgggcaacatggtgaaaccctgtctccactaaaaatacaaaaattagctgggcatggtggtgtgtgccgtgcctgtgcctgtagtctcagctactcaggagactgaggtgggaggactgtttgagcccaagagatggaggctgcaatgagctgagatcatgtcactgcactccagcctgggtgacagagtgagaccctgtcaaaaaaaagaaggaaggaaggaaggagagagagagaggaagacagacggaaagaaagagagaaagagagagagaaagagaaagaaggaaagaaggaaaggaaggaaggaaggaaggaaggaaggaaggaaggaaggagggagggagggggagggaaggagggaggaagaaagaaagagagagaaggaaaggaaggaaggaaggaagggagggagagagggagaaatgcatccttgggaaaagagaaattacacttacgctgggaagaaggtcagggactttcccagtctctgtgaagcctgtgtctggcagttgtggaatgagaaaagaattgcccacagagctggttttctgctggctagaattctatgccatttatttccccccgtaactcatctaagatgtatattgttgttttcaggatgtgaagctgctgcacaaacagttggcagggtgtgagctggaacaaatggatgctcccattggcactggtctggacgacatccttgagacgatcagaattcagtgggagagagatgttgaaaagaaccgggtggaggcaggagccctgctccaagctaaggtgagaggcaggaccagcatcctccactctgccctatgcagaaggaggccacgctgagctgcaaactagtcaatgtgcagacgaagaaataacaacggtttagtaacaagttcaacctcattagaaacagaagaaatgaaaattaaaataatagctttttgtttacctatctaaaagtagaaaatgtttaaaatggtaaaaatgctggcaagtatgtggagaagtaggttctctactgtattactgaagagcataaactagtgcactgcctttgaataagaaatttagtaatatgcaccaagagtgttaaaatgcccctagctaccaactgaataatctgaatacaatcctgaaagaataattgaggccgggcgtggtagctcacgcctgtaatcccagcactttgggaggccaaggcaggcggatcatgaggtcaggagatcgataccatcctggctaacagggtgaaacactgtctctactaaaaatacaaaaaattagccggacgcattggcaggtgcctgtagtccccgctactcggggggaggctgaggcaggagaatggtgtgaacctgggaggcggagcttgtagtgagccaagattgggccactgcactccagcctgggcaacagagcaagactctgtctcaaaaaaaaaaaaaaaaaaaagaatatttgaaaaaataaatcatctgtgtccaaatatactcactgaagcattataagagtgaaaaaaacatacacatttactagtagaagaaaatctaagccacaacctacctatgtgcagtaaaatatcaggcagttattagaattaatgtttatgaagcatttataaaataggaatgtgttcataatataaggtaaaatgaggagaaaatgagagtacagaatggtatatgccagaagccaaaaaatattctctgtaaaggaccaaacagtaaatatttcaggcttcttgggccagatggcctctgttgtaactcctcagcgctgccactgcagtgtaaaagcagctgtagccaataggtagctaatgagcatagctgtgttccaataaaactttatttacaaaaataagcggtgagatggatttggcctgtggactgcagtttgccacttcctggtatatacagtagggtaaagcattcaaacaaagaaactaggcattgagaaaaaattttagaaagaaaagactaaaatgggattagcagtcgttgcctttgagtgatggatcagtctgacactttgagatgttttttcttttttgtttttgagtatttctcaagtttttgttaaatagtatacattatattcatggaagaaaaacaacttttattaaacctcataaataatacaggaattaaccagaaaataggatgcatagggtttgttcttcccttctccatctcccacccatttctgactttgtaatcttgagacagaggatgaaaagtgacaaggaaggaaaatgtggaaaagtagagaaaataaggtagatgtctgagttaaggcaaaaggctgtttctgagctcttgattactatttagtggttcttgatcctggctacgcagcagaattatttcagagcattttcaaaaatcgccatcccagaccaaccaaatcagacagaggagagggactttgtgatttttaaagctctctggatgattctaatatgcagccagatttgagaaccataagaattataaaaagctatgaaaagaaaaataggagaggcttttctgtcctttctcccaccatactccctctatcccccaagtatcaacaagaaccttcccagcagggtcttcatcaattctggattcccaaaatgttctccagcctagaaaacatcctttcactcacccatttctccaacccctaccccgtttcaatagcttcctttctttctaaccaccaatcattgagccaggtcactacaaacacttttttatggcaaatagagcctagttattaaaaaaatgacttcccctcgccccacccaacctgatgagaagtggagcaacacagaggtaaagtgaagccatagatttgagtttggtccattgccttttttaacagactcatgacagataacagataattaatggtcctagagaccatctgatcccattccctaattttaggtgtgaggaaactgagacccagagagtgcaggtgacttcccacgatcacacagctggttgagagctccatagttcaactctcctgttcttggtccagagaccttttctctgcattgggctgcatcgtttctcccctggctctgcttctaaagctaaacctcagaggcccagcagtttgcaaactttgcttctgtcccagccctcctgcggtgtgcaccacactgtggtaactgtttctttgggaaaggacagactattataattatcagaaataaatccttcatagtatgaaaaagaaaaaaaaaaggtcattattatctcctcctcaccccttggagaatcatcactagcccaacagtaactcaaacattaattctgaacagattcattagtgtttttttaatagagtaatctgaaagctacatctcagagaaaacagacagtatttgttttagcttggccaatgctgcctgggcctcttgcagaaaggcagagctcagaaaatatttgcagaatgagtgaattcctctgatcatcaacagagatctgaactgacagccagaattcctccaataaatagttttgtcagttgcagttgtgccctcaggggctgacatttgcccatcctgagcatctcttgtcggtttcttggcggcatagcataaatgtgaaatggcttagcacacacagctttcaaaagcttttgtaaagaaaatgcaagcatgcatttaattacctttcggaccacagaggctgaaaattaattaacatgattaatttatatcttagtttaggttccttcagaagcagatcctgaaacaaatattggagttaaggtagtttacctggaagttggggagttaaaaaccaacaaaataccagtagaggagaagcaaagaagggaaccaacaaagaatgcctaatcaaaccagttaccactgtgggagactgacgtgtaaaccaagaagaattgtgagaaacggtatagactacaggagaggggaaaggcaagggagctgagatgttaataccatctcccaacagttttctgccatctgctatcagagtggccttccaaaggcttcagagaaactctcaggcaaaaagatgcagaatctggcagggggaacaggagagcactaaactgcgaaagcctaagggataaaggtggtaccatcagcatctgctagaacttatctgccaattctgtttattttttcagtcattaaaagcttaataaaatagagacataaaaaaatttattaagaggttctggctaaggtcagtgcagtattcatattctttccagctacggtgttacgaatgtcaggaacctcatggtccagtttttgaagcttctgaagttgtatgattcagtgatgacaggatcagattggtccagagaatttctggagggtcttaaagtctagttcttccttgtctatttgttgtggttacctaatgcagggtactcagggatgcttcaggaacctcagacaacatgccacaccacactctagacctcctagttagtcaagtaaaacaaaacaactttttttttaagttgggcactgtggcatgtgcctgtagtcctagctattcaggaggctgaggcaggaggattgcttgaggccaagagttcaaaggagaagtacactatgatcatgcctatggatagccactctactccagcctgggcaacatggtgagaccccatctcttttttaaaaaatcctttttgtcccctatgctcttacaaaatgcttctgacaccaaatatgtaggtttgttccacaccaagcagatctccaaacaccaactgagtgtcctataattcaattcaatcctgacactacctgcctgaagtagtatcagatcccacaggttaagggctcagtcccataagacagccctcacttcagatgacaagtctggccctcccatacttcggatgaactggctataaattaggggttcccacaacctcctctgcagagggataagtagatagtttgctagaacagtgcccagaactcaaggaaacactttacatatttttgccagcttattataaaggatacaattcaggagcagccaaatggaggagatgcttaaggcaacgtatgtgagaaggggcacagagtccccaactccaaatttttgactctattataataacacttggcttaaaatgcaaacacgtcatacagctatacaaaaatattctttcttttatccttattctataagcttgttttctatttttaagaggggttttttttaaccttttaaactttttttgttaaaaactaagacacatacatacacattagcctaggcctacacagggtcaggatcgtcaatatcactgtcttccacctccacatcttgtcccactgaaaggtcttcaggggcagtgacatgtgtggagctttcagctcctgtaacaacaatgccttcttctggaattcctcctgaaggacctgcctgaggctgttttaccgttaactatttttcttttttaataagtaggagtacgctaatgataaaaagtatagatacagtaaatacataaaccagtaacatttactattgttagcaagtgttatgcactgcacataattgtatgtgctagacttttatatgactggcagtgcaataggtttgtttacactgcatcatcacagggtctcacaaagctgcaatcaaggtacccaccagggccgcattctcatcttcagagtttgttcgggttcttggcatcgttcaattccttgcagatgtaggcttgaggtcctcaactcctagaggccagtcctcctcagaggccatttacaacatggctgtttgctccttcagggccaacagaaaagcattaccattttaagcctttaatctgattaagtcaggcccactcagatactcctcttttgatcagctcagatttagctgatttggaaccataattacatgtcaaaatctcttcatccttgtcatctaacataatttaatcattggacataacaccagagagcagagatcacggaggccatcttagaattctgcctaccaggcccctcagtgttgagcagagaactaaaactctgcccctccccaaacccccaccatctcacctcctctgccaggcaaacagctctgccctcagcccacctcctgtaggggagcacgggtcccgtctttcttgtccaatttctcagccggggcactgagacgtctttgttccctcaccctaagcctggtctgaagtctgcctcctgcaatgcaagctctgttttgccttcttagccttcttcctgagatgctccttccattcaatttccatttgcccaaagctgactccacactttcattcccagaggcctcatttctccatcccttgcctgctgcaactggttgatgtatacaatacccaaaggcttaatcaatcaccagcacaagttggtggttgcccggatgtgagagaactcagtctgtcttaagagtccccagggtcaggaacaaatggattgctcccatgctatcttctctaacagcaggtctgcacttgcctcaggtcagtttgaggcatctgcggtcaggaactttatctgagctgtaaccatcatgccttcatgtcacatgtcaggatgacagattgtgcaaactattaagaatgaagacaagtgaatagattgaaatgaattgtgaggtttctggttgttgatagtcttaaggccaaaagaaacattcaagatcatctaaagccgggccatctaactgaaatatcgcaatgatgggcatattctataatccacgcagcaatccggtatggtagctactggcctcaaggggttatacaggtgcagtggctcatgcctatagtcccagcactttgggaggtcaaggtgggcagatcgcttgagcccaggagttcaagaccagcctaaacaacatggcaaaaccctgtctccacaaaaatacaaaaattagccaggtgtggtgacatgtgcctgcagtcccatggaaactacttgggaagctgacatgggaggatcacctgagcctaggaggtcgaggttgcagtgagctctgatcgcaccactgcactccagcctggacaacagagtgagactctgtctcaaaaataaataaataaataaagctgaggaactaacttttaattatgtttaatttttatttcagcagctacagatgactagtgactgctctattagaggacagcataggtctagatttacccacgaggagaatagaaaccttgaatagcatctctccatgtcatctacacttacaaacaataattttccctgtaaacacagacattttatacaagctactctgtctagactttttctattcttgcttttaccaacaagagtcaatattttctaagatatatgaagctgaattaaaacaggcactgccactctgactctagactacaagatgacctcttgtgctattgccatgttaaccacctgggaaagttcctttccaggggaacagcaaaagcaggacgcctgacagcatctgtaatctagaggctcctgtgtgccaatgagctggctggactccctgagggctcttcagtgaaataagccatggctgtagccagtgtgctcaaggcaaacactgaacggggatcccgaagcatcttcatatctctgaatctcacagagagcttcacaaaagggccctgtttgcttttatgtctttttaaattgacttttattttatttcaacatgtataatagataatacattcacttagttcaaaattcaaaacatacaaaagatataaagtgaaaagtgctatccaacccatgtcctagctaccgtttttttctatgggggtcaatcaatgttatccttttcttgtatgtcatttcagaaacattttacccatatacaaagaaatatatatattttttttcctgtctttttacacaagtagtattcagaacatactgctttatgactgtatgatattataccacagggggcagcaaactctggcccacaagccaaatctgacccattgcctgtttttacaaataaagttttattggaacatgaccatcacattcatttacatatcatctatggctgcatttgcactacacaagtggagttcaatagttgcaacagagaccatatggcctgctaagcctaaaacatttactatctagctagtcacagaaaaagttgtcaacctctgttctagctaacagatgccccagaatttgtttagcctgttccctactgctgggcactgagggtggtttccaatcttttgctattagaagaaattagtcactaacatggtatacctctcatttccatatatagaaatgtatctgttaaatgaacttatagacatggaattgttggccccaaaagtgtgtgcactggtaattttgataaatattgccaattgctctctacaaagattataacaatttacatttctatcagaaatatttgagagtgtccatttccccatatcttcaccaatactttgtgatctttgctaatactatgggttaaaatgcatttcttacaaattgcttttgtgtgtactagcagatcatatcttttgcccatttgggttactgtagttgtatgctatagtagcatataccagttggtgcggctgcaaagagaatagggaaaatcaagaatcagagcagattttaaaaggaaaaaccaaaagactgtctcattgaggtaggtactgcctactctttgcctcttcttttctctagttaagacaacacacaggctgggtgtggtggctcactcctgtaatcccagcactttgggaagccaaggcaggcagatcacttgaggtcaggagttcaagaccagcctggccaacatggtgaaaccacgtctctactaaaaatacaaaaaattagccgggtgtggtggcacacacatgtaatcccagctactggggaagctgaggcatgagaatcacttgaacccaggaggtggaggattgcagtgagccaagaacactccactgcactccagcctgggcgacagagtgagactttgtctcaaaaaaacaaacaacaaacaaaaaaacacagacattgtagagcgctctctcaggcccttatcttcttatgttgtgtgtttaaactcacaactggttgactaccaatatctgggtaactacataggggatcacccaacattgcaacctctttcttacatcttctaccaaggaatctccactcacttattcattcaaaatctgtttgtcaaggacaaaccaggtgcaaggccctgacttgatgctatggttcctgaagtccctgacttcaaagaacgctcgtcccagactacctgactgtgctgatctcaaagcataccttagatattttttaacagatttttcccataaaaagtgtaaggactggccaggcacagtggcttatgcctgtaatcctggtgctttggaatgcggaggcaggaggatcccttgaggccaggagtttgagatcagcctgggcaacatagtaagaccccacctctacaaaaaaaaatgtttttaattggtcaggtgtagaagcacgcaactgtagtcctagctactcaggaggctgaggcaggagaactgctcgaactcaggaggtcgaggctgcagtgagctatgatcttatcactgcactccagcctgggcaacagggtgagaccccgtctcaaaataaaataatagaaaaatctatttttctctttagaattagactcattgctgagcctcttcagctgattttatcaagaggatgagcttacttattacaagggggcagcaaggtcacaaagccatttactcctctgtgttttgtttggcagctccaacggaggctgggaattggtcctacactcaaacagcagcttcaatagctgggcagttcttgtgtaaactcacagagaaacttgtagcctagccgggccagctcctctgccagtgttgaagtttcattgagtgaggcgtgcacttctttttaatccccgctgaggagagcccatgttgctagtgcagactggatggcatccagccttctcccaaataaatcctacatctggctgaggaaggtcgggagtgtgtgctgcctgtcaaaagctatccttagctaaataacatatgacaccacgtaactgtaaaatgacttacaactgttataataacgatagctgatcctcttaatgaaaaggagatttgatctcatcctattcctggtagatcctcctcttcttccctagtccctagcatgtgcctggcctacattgtaaaccttcagtaaatattgttgagcacattctaggtgtaaaaagctatgttaggtctccaaaaggggcagaggggtgagtaagaagttgttcctataaataaggaacccacagtccagtgtggatgttggctggtgtacctgtgggaggcaagaaatgggtagaaaggctactcttatacaaggcaggatgaaattttccacaaaagcagagccagccaagcttttatggagcatctaccaagggttctaagcacccgacaggtacgttctcatttaatcttcccaacatgagataggtattgcgattttagcattttatagaggaggaaactgaagcacaaagaggttaggtaatttgcccaaaattacacacttagaaagtggcaacactaggattcaaattacacattctgactccagaatccacactcttaactgttagtttgaactggacagaccacatgaatggggggaccttaatttggtttttaaaagatttttttgtagaaacaggatttcagtatgttgcccaggctggtcttgaactactggcctcaagcaatctttctgctttggcctcccaaagtgctgggattgcagatgtgagccaccatgcccagctgatttcttttttaagaataaataagtgacatcttgtggaatgtgaggttggagaggcctttgtccccggggggctaaaagttatgccagacttctgttgggagcttttcaaaccaagcgtctgtgccctccttgtgggattcttctatgacacaagatagggaacccctgtattcccatgggaccattgtttacctttctccatgaacagcacgatgagattagcatgatctcatgaaatctgaaaagtgcttaagagccaaggcaggtagctgcattctgcagtagaacaatgctcatataaagcaattgatcaccagttgcaaaaaccagagtgctcgagtgacttgctcaaacctgcacagcaactgcttagtgaaaggcagaagacacatgaggcagacagctcatctggatacatgatctgctgagaatgcacttgcaatttcaaagaccaggaagtatcaacattctctctcctcactctccctcctcctgaacactcgccttcccctcacattgcaaaggtagcgtttctgtcagttctgggtcattgccaagggtgtttttaggaatggccatcctaatcagcaaagtgggtcaggcttggacttggagatggttcttttcctctttcccagtcctcatttgtatcttcaagagtcaggctctcaaatacttaattattacttacttagaacacattgcttttctcttctcacatccttcatgtgcaaaaacatgctaatttaatttgaaatttttgaaatttgaaaatctttattatgtttcaaaatgtcgacatgctctcctgccccagaagtaattgcactcctaccctgctggagtgcaaacacgggcggctcaggtcctgtgcagtttcaaagcctagggatcaacatatctgaatttcatcacacaccctaacaactgcactgggcaacaaaacacagccccaccttcctatcctcaggggctagatgacacacctactctctggtctatgagaagaaatctggaggcacagggttgaaatggaaacagaaatagagttataataaccagaaagcacaaatctaaaaagccattggataaaaatgtgtaatacttttaggtgaattacttttagcagtggttactttaggtgagttaaagcaattaagtgggaagtatctcttgtggtgagatgatttgagaaggaacacagtgacattaaaacttgtagtgatcaaattacattcttttgctctttcaatcttaaactagaagaaagcctctgttcagtgctgggaggtctttaacacctctgttgtacttatttatctcccctttccacaaagagaaagcaggcctcaggacttagcagcttggcagtcaatggtagctggaatttaataacagtggttggttataactttattaattttttagttatcctctacccactgcaagggatactgtttcattggtttctgcagcgatctagaattttgcttccatggaccaggcaggcatcacctgggagtgcagatttctgagctgtactcaggatcccctgcatcagagcccacattttctcaagatcctaaggtgacgctcatgcgcatttaacctatagtttccattttaaactaacctacagtttacagataactaacctacagtttccattttaaacacgtttatttgtaaaaaaagagtgaattggtttaaataaaaatagcatgaatgagtattaagagagtgtgaaaaaccatgtcagtggtgcaagaacatttgagaaacacctaaatacagtatttttgctaatgaaactaagacatggtgtttcagccaagaaaccagtaaatatcacggaagctgctcactggattgagaggggacaaatcatgtgagggactgtggctatagccttggccagcagctttacactagacctgcacaccaaggctttgaaacttgcctccattccttccctggcttttccgtatggagtgatggtaaatgtttcacaactgctttctgggtgaaatatatgtatatgtatatatgtgccaatcacattcacaatactgcttaagggtaatgtaacaattcccactgatttttttatatataattttagaaataacacaaattttaagacaaaatactttgctatttcaattacacctataacttcagcatgacttgctatttcttggaaaattcaccaaccattttttataattctatcatcaacaatagtatcacaaaatcagactacaaaaaatgcttgattactaatttctgattaagcaaaaagtcactcacattatttgttactggtggcaaatctgtagggggtctgaagcaacctcaattcttgcctcctcagaagaaagaattcaactgaagggcataaagcagaagagacggaggcaagttttagaacaggagtgaaagtttatttaaaaactctagagcagagaccgggcgcggtggctcacgcctgaaatcccagcactttgggaagctgaagccggcggatcaacggaggtcaggatttcgagaccagcctggccaacatggagaaaccccatctctactaaaaatacaaaaattagccgggcatggtggcaggcgcctgtaatctcagctactcgggaggctgaggcaggagaattgcttgaacctgggaggcagaggttgcggtgagctgagatcgcaccatcgcactccagcctgggggacaagagcaagacttcatctcaaaacaaaacaaacaaaaaactctagagcagaaacaaaaggaaggaaatacacttggaagagggccaagcaggcaacttgaaagacaagtgcgcagtttgaccttttgacttggggatttatacgttggcatgcttctgggatctttcatcccttctcccgattcctcccttggggtggggtgtccgcatgtgcgatggcctgctagcacttcggaggggagcatgcgcagtgtgtttactggagttgtacacctgctcatttgaggcattcttctcttaccagctaaatgcccctaggaggtcatataccagtttaactctgccattttgccttttagtgtgcatgcttgagctcacttgcccaactcctgagatcttatcaggaagttgctgatcaccagtttcaggttttttctatctttagggagactgcttttccctgccagctgtgacaagttattattttagagagactgttaacaaccacctgaccatcacctgatggtcacctgacattcttagttggttgtgggggtgcctctcccgccctgttcatgtctgactggctacctattagctacctctgttacagttaccagtaacaatgtaatttaatttctaatgatggctgtgtttagcagtcaacttacaacattcctgaaaatttaaaaatcagctcccgtgagctgttaggagcaagttctagctcactactgctccccgccaccctctgtagctacattgtctgactccatttgccttccaggatgccccacctcctgcctcctacctacctacacagcccatctggccaggaacccaaccccaaagaggggagaaaaactggggtattgatcataagaacttggaagacaaggagtatacttcagaatgatccacctgagtttggggaagatacctccaattttagggatcttaaattggtagattggtggagatgacaacattaaatactagttgagagcacatctctgggtctgctgctgggctggaatcctctttctgtctctcactggccatataatcttgagcaaataactcaatctccctgtgcctcagtttcctatgaggataataatgacatctccttcatagggttgtaaagattaaattagatacttgattaaaactgttaacaatgtgcttggcacagaataagtgcctaatacatattctttattattagtagtatttaactattactatttaattgttactaaatatttgactcttcatagtagcatttaactattaccactttgttatttaactattaaataacaaaagttatttgttggccactattactttttacatttggaaaatatatacagtcagtgttttcatgcttttaagattctaaaggcttcagcatgcttaatctgctggaagcctcacagtgaccacaggagggagtcattatatgataatgagtattattctccattcattgtggtctgtgttccatgggcagaaattgagactctgagaagctgaatgatggcttagggacacaagctgttggctaaccagtcagagctgggtccaaggcttctgttctccttcagcgactccaaagcctttaatggtcattctttgggctctgtaaagaccaaacagtaagaattggaggtgctactactgagctatgagccacttgacttggggtttcttttttttttttttttttctttttgagatggagtctcactgtcacccaggctggagtgcagtggtgccatctcggctcactgcaacctccgcctcctgggatcaagaattctctgtctcagcctcccgagtagctgggactacaggctcacgctaccatcacgcctggctaatttttgtatttttagtagagacgggttttcaccatattggtcagtctggtcttgaactcctgacttcaggtgatccacccacctcggcctcccaaagtgctgggattacaggcatgagccactgcacccagccttgacttggggtttctagccagtccattagattggactgtctttggactattctgtaaataaatattcatatgtggtaaaaatggtaattccagaaaaccgtaacctaggaaagtagagttttttccctcctccattcttggctaggagacgttccatcagactgcatcgaagaaaatggggatgatctctcatttttcatcttttccccagaacagaggagtaacaatgacctgttcccctgaatatatggggagggatcagactctgtccatcttgctctggggagaagttaaaaacacagagcttccctttgtctgggtcacagttgtgactagacacatggttttcacaaggaaacaggcactatcagattgacagagatcaagttggataactccttgtttgagggcggtatgggacaactggcactgtcttacaatgctgaaatggatttcaagttttccgaagggaaatttgccactattcaccaaaattaaaaatatataccctttctaatcagcagttctactacaagaactactttctcaaagacatgctcttgtatgaaaaataagggatcaaagctttttctttgcaccattgtttgtaatagagaaagaaagactagaaacaatctgagtgtccaccagcagagacttctaaatacattgcagcccttccaaacaagacaacactgtgcagccgctataaagaatgtactcaatttctattaggttggtgcaaaattaattgctgtctctgccattgaaagtagtggcgaaaactgcaatcgcctttgcaccaacctaatatgtactgatatagaataatttctaagatactttaagtaccaaagcacgggggggggcaatacatatttatttataaatatataaactatttctggaaagaggaataagaaactagaaacaagagaactggataattaagacacaggagaaaatgagactttatagtctgtaggaaatcttttgaattgtatttcatttgcaggcatcgtatgttcaaaataaatacatttttgtatacaagttggtgaagggacctgtttaaaaaaaaagacatttccagccaggcgtggtggctcacgcctgtaatcctagcactttgggaggccaaggcatgcggattacctgaggtcaggagttcaagaccagcctgaccaacatggtgaaaccccatctctactaaaaatacaaaaaaaattagccaggcctggtggcgggtacctgtaatcccagctactcgaggcaggagaatcgcttgaacccaggaggaggaagttgtggtgagctgagatcgcaccactgcactccagcctgggctacagagcgagacttcatctcaacaaaaaaaaaaaaaaaaaaaaagatgtttccacgtgacagctgtatttcctctggttagaggcagtggagtggtgattagaaaggctgggaaggaaggatgggctcagatttctgatcatcaccgctcacactgagacctgactctccacagcaacaggcggaggtggcccacatgtcccagacccaggaggagaagctggcagctgccctcagggtggagttacacaacacttcgtgccaagtccagagcctccaggctgagacagaatccttacgtgccctggtaagtgggccaaggaaagacctggtgtccctgtgctaattttaactctctactgtcaaattccagtattatggatcttagtttccaggggattcccatctcacagcatatgagttttgaggcctgaaatgtcttctgactcccaaggatcatcagatactgaatcacagcaggtgcaatagacactgtagtgccccacggaaatatctcttaccaggctgctgcagtaaatgttgactgttaacatctgcagccgccccttttcagctgccccactgctccagagacctgcccttacccacactgaggacacctggcccagaaggttaggccctgccccccaacgctcagccagtgactaagagggggctttaaaattaaaagcccagcccttttgcttcaacatggagctagctccatgctatagagctctccataggaccaggctgtagccagattccagagaccacatcctcgcttagtgccttcctctgccctgtcctgctttcctcactcccccttttcctgagagtactccttaatgatttgcgagttccaggatccctaactcaggctctgcttctggagaacccaacctgagacatctagtaagctctcagactcactgggatttgcaagctcgtctctttcattattaattatttattaaaatattaaaataataaaatgtattaataatgaagcaatccaccctctgatctctggaatggattgaagttctatttgggtattaaacatcttttcttagatgtcccctccaggaggtcatttgcattgttctaactacagcttcgttggtgcaaatcaaaggttggtccatgtaatccttgtgcagctgagatggcctggagtcaatgaggcgcatgataggatgtaggtccgtgcaagcatgtataagaaaaggatctgaggatctgaggggaggaaaatcaagagtaatagagtcagaagggctcagctcctccatttatcccttgggtaaagaggcaaatccctgaaccacagtttcctcttctgcaaaatgggtatgatagtcacagtccagcccacttctcagtgtttctagggggatccaatgtgtggatgcacatgagcatgctcttctgactcttagcattattttgagaacttgctatgttcctagaactgtaccaagtgctttggagacataaaactaatgagatatggtccctgcctccaaagagttaatgtggcttcggtggaggagctgatacaaatgtgagggaggggcagatgggagagagcacccctgctgtgggagtcaggaggtagacttcgtggtgggtgctctcctcactcactagctatgtgaatgaacagctttcattttctcacttgtaaagtgaggatctattttggctatcatatctagttactgtcttagtagcttaagacaacagtgaatcacttgttctctcattctgtgatttaggcagaattcagcagggataactcttctctgtatcatgtggcctctgctggggctggaacacccaaaaatggcttcttcatttagcttctctggtgactcaattgtgcatctctttttctctctccctgtgaccactccgtgtagctagcttagacctcctcatatcatgacagcctgacatagtcaaacttctgatatagcacctgagtgagcacagaagctaccaggcctcttaacacctgggctcgaaagtctctggacatcacttataccacattctagtggtcaaagcagtcacaagactatcctagattcaacagggagagaaataaattcaacttcttgatgagacaatggcaaggtcacattgagaaagcgattgtggagtggagataattgttgtagctgccaatgcaagtgtgagccactttaggatcgtaatagaatttacctcataacgtcattgagatgattaatttgataatgtatgtcaagcccttagcacagtgcctggcagttagtgagcagtcaataaatgccatctattattaattatcatataaaattgctataatagctactagtacagtaactccaagttggcatcaccagccacctggtcacctcacttaaacccagggtcctaaccattggggaaaaaaatggaaaaataatttacactctcaaccagaaaacttcagagtagtgccattctgtctatgcccatagcccagaacaggctgcctctgttccctgctggttctagtagattatcgttctggtcacggggccttgcagccaaggtgaggagcacagattgggacaaaataggtaacaaactctcatacagttttcagatacaggaagttcatccagccattcctgttattctgtcagagcgatctgtgcacacacaaggcccccgcagcttatataagcttcagacagccaagctggcgagactttcggccccctttgccaataaggcactatttgcattggaagctaggcacaaataatggtgcttgagacctgctgaactctgtgtccagtcaactcaaatcaggaatggaattcaaggccagaagtcacagaaggtcactattttactttctggaggattttgcaatcccagaaagtcccttcaaatctccagagacctgcagaataagtgtgcttctgtgatctcagcttgtttgctggtgctgtctgcgtggctgactgagccagtgtacttgcctgcaacagtagcctgatcatagtcactccagctcaagcatctctgggagaaccaggcatcctctctttctgccataatgtcagggacttaggtggggaagctggattcggactttaagggtgagatggaagacacatataacctttggctggggttccaatgaatgccctgttggcagtgggtcctaagtcaccatggaaaaacctcaggccacatgaagaactcacctagaagatggagcaaaaactatagacagatgatccaaccgtgattctgtgaagcgtgttcccaaatcacagatgttacaaatccaatgtcaacaacaactagtcacaagttaagtactttcatgcataaacaaagagagaaaacccagggaggttggaacaaatgatgctcaaagtcaaggtggccatttctgcatcctcactgctatagaaaggtttccagattctattagttaaataataaccctagaccagatactgatctagatttattttctagtgatcacgttttgcctcttataaatatgcctcagacagatgagaatctgactcaacattctcatatcctatggaattaagaagatttaaataaggtaatatggtgatccatgctaacagcagtcatgattcaagatggtgtcgtgacagaattttctgtttcatccatagtggtcataagggtgtaaaaagtctcctcctggaggacagggtacagaaacttgttgcatcaaaatttaattcaatccaatttagaaagatatttgttttttgtgtgttatattaaaaagccagatgctaaagtataggtgaaccatagttaaaactattggaaaatgttgaacacagatacagttttttaaaggggtttattgattagctctgtagttttcaggacatggtgcatgggaagatgagaagaaagaagtttccagtctaatggggagacatagatagtgcaataagtgtaaccataatacaagtgctatcatccagggcaatctacacataccaagaacctattctgtgccaggccctgacttgtgtgctgggactacagagacttggttccttccaagtctcaccatctggtggaaaagacgtgcccataagcaagcttagcccactgtgataagttcaagagcatgcatgagcttggggagccatggaaatacagagggtctcctaacccagcttggtgatggtagcggcagaggagtttcaaggaaggcttcctggggcaggttacctctaagcttggacttggggatgagtaggagtgagtgaggtgaggatgctggaaggaatggaggagcatggtgcaggtggaggaaagaacacagaccaaataaactccaagactggaagtgttgatgctgctgtagggtggggataaagatggaaacatactgggccagctgtgtgtgccatatcaggggccctggggagccatcaatggagtttaagcagaggagatacaggcccaggtttgggctttggacagagtactgtggctatttgtgtgtggaactcaggaagaggaggaactagaggtggggagatgagctaagaggccactgagggtaccacaggtgagaggtgacaagctcccaatcccagaccatggtggctgcagaatgtgaaaacttctcaagagatacaagaagcaggactcataatatacaggaggccatgatggttgcatttggaaggaagagaaggaaggaaagcaggaacacatctttccctggtttccagctcacatgggttcacccgttgaagcatagactagggggagccagcaggttcaggaggcagccagtggcttcattttggacaccttgatgtgaggtctgagtatatgtttccagtaagaagttcagtggcaggtccatagctactgaaggaaagattggtggtggaattatcaacgcaggacgtggcctggagacgactcatgagtatgttcaaatcatgagtatgatggagaccaacacagacccaggatgcgctccttggaaaaaaagcgggctcagggtgggcactgggaagcccaaagtgaagggacggcagaggaaaagggatgggcaaaaatgtgctactaaaacaccaaaggggaaagcgctgagtatataaaggccagagacattcattctaaggacagtgatctgggaaagaaagctggaggagatggtgttccagccaaatgatggatggggtttcagcagcagagggagaaggggtcccccggggagtgaagaaatcagaagaaaaagccccggagaacaagatttctttgaagaaacgcctgcaagctgcctctcatttgtctctctcaatccctatccctcttgccccgctcctctctctcctcacaccccctttcttttctccctccctctctccttctctttttcgcctccctcaccctctctcccatcaaaaagatcaatcagactaatccacagtctgacctgagtgggattccttatttttcccacggagccactaagaataacccccatcagtctccataactggcaaggtccctgccacgaggggaatagtccgggctaccaccagcccctgccactgctctgcacacctccctcttcaagggcccggcctgttgtcctcgggtttggaccgggttcgctcttttgtagaaacgaggcctggagaacaccttgcacgatgccaagcactggcatgacatggagctccagaacctgggcgctgtggtcggccggctggaggcggagctcagggaaatccgagcggaggcggagcagcagcaacaggagcgcgcgcatctgctggcccgcaagtgccagctgcagaaggacgtggcgtcctaccacgccctgctggacagggaggagagcgggtaagcctcgcttccgcgtcaattatccaagagatgcatattcgtggctttaaaaataattattttccaaacactgtagaagtatttaagaagaaatcaccccagacttcctctcacataggcacccattcccacagcctagctgtgtccttcctttcctattcacatacaaataatatatataatatattcacatactaatacattttctatatgtatgcatatttatgtatgtatatatacacacatacattcacatacatgtgtatacctaggacgtacataatagctgttaggaatgtttcagttgcttgtaatagaacctaattaatgaggctataaaccagtgctcctgaaactaatgtgcactcaaaaccctgcgcatcttttttttttttttggatacagggtctcgtctcggtatgttgcccaggctggtctcgactcaaacccctgggctcaagtgatcctctcacctaagcctccagaatagctggggttacaggtgtgagccgtgacaccccagctgggcatcttttttaaatgcagattctgcttcagtacgtctggggtggggtctgagagtcttcctttctaacaagctcccaagtgatgactatactgctgctccacagactacactctgagtagcaaagatgtgtaaatcatttatttaagagtcccagaaacaggtgatctaggctgctcaaagatttcattaaggactcaagctcttttcatctttctaacataccatgataacattggctttttgtctttatctttgtcaccccatggttaccatatgccagccacagatccaaacatcacatcctcattcctggccggaagtgggagagaagaggcagcagcaaaaaaaaaaaaaaaaaaaaaggctttttctttttttttattgatcattcttgggtgtttctcgcagagggggatttggcagggtcataggacaatagtggagggaaggtcagcagataaacaagtgaacaaaggtctctggttttcctaggcagaggaccctgcggccttccgcagtgtttgtgtccctgggtacttgagattagggagtggtgatgactcttaacgagcatgctgccttcaagcatctgtttaacaaagcacatcttgcaccgcccttaatccatttaaccctgagtggacacagcacatgtttcagagagcacagggttgggggtaaggtcacaggtcaacaggatcccaaggcagaagaatttttcttagtacagaacaaaatgaaaagtcaaaaggctttttcttgaatgatcctctcctttaatcagtgaaggaaagacattttgaggcttgcagtggactgtcccttatatctcattggccagaacctgcttatactggccatacccatctgcaagggaggctaagaaagcaactctttagcttttccagactccatagtggaggcaggcaaggggttgggactaggagttgagttagtctgccataattacacacacacacttgcactcactctttttttaatagataaggattccagaggcatatacatcagccttgggccttagcttccttgccaactctttccagaaacccaggcccttattttgtatcatagttctatgccttcttatttccctccaagactccttgtctgacatatgttgaataaggaatagagacagcttagtgattgtatcatccaacccctcctgattcaagagagaacacaaagacccagaatggaaaaagatttgcgcatgatcacacaggaggcggagacagcactgggatgggagcccaggtctcctgctctctccaactgtgtaacctctctttattcagaaggcgggagagcctcaaggaagcgacctaaccacgccctgctttcaaatggaaaatatgtcatccagctcctctccaactgtcttttattgaattgatttttgttgattataaaagccagatgttcctaacaaagtatttttttttcggatgcctatgagcatctgtataaacacacaaagtcaatttaaacaaacagcaagagcagtgagttaggccgagttacttcttaagaatctatgtgctacgttcatttagtgagtgccaaggcagacctgactcttgattatttttgtttatcctccaaaccctgccaagacaacctcatgatccgtgttttagagacaggaaacaaagcctcagagagcttaagtcatggcccaaggtctcacagcaaataaccatggagtaattatttaaaacccaaaactatcttgttccaaaggccagattctttcatgagatggccccctttctcgtaatcctattgtgatagaatgaccgattttcctcacccattgcttctgactcctatgtgtttcctttcagctgatggagaaacttcctctttttcatgaagaaaacacccttcctcaacagctgacccaagaagttgcttgaggagctttctcctgagctccagtccctgctggattccctggttaattcagcttgagctgaaaagcttcctggaagtggagaggatccttctgctttaatctgagtagtctgtagcttgagcaatctcccttgtcctccttcaaataaatgctttgtgcgcagcgtccagtttgcccaccttgttcaactcactatagggtcgagatggatatcactttgtctgtctggcctttgctcacagagctatgcttgaaggcttctggaaggattcccttgagtgtgacgccatctgcctccctagggtcacctgctcttgggtttgtcaacataaaagtgctgcggaggcaaaagcagtgctcatggcatgcaggattgacgcagtctgggacaaaaaacaacactcttgctcgagaggggattagtgtggtgctttatcacatgtttcataattacaggcatcgtggagtattcagacctctttaatatactctgcatgcatattcatgtgcagacacacacatttcacttgctattggcagagcatctctcaatcagttaaaagggaacttcagtctaagcccaatctaaacccattcaatctaagtgggggattaattacactgtggttgctcaccccacttacagcctcagaattttcttccagggtcctttctccagttctctcagggcctaagccagccaaatatagttcatgcatctgccacctacccaggcaagactctcttgccttctgattaaaattgaaaccaccacctgtgtcctaccacaggttctcagtgtctctaaaactgaaaggaaaaaaaaaaaaaaaaaaagcccaactttaattttgtcattcctccctcaaacttctgttggtctacctatcacacagaattacagaccaaaatatccaagctgagtctttgtgtttgtgagctgctaatccagacagggggatgtatccaacactggtacatttgaaaacccccatacccgagggtccaaataaccaaggcccacacaaagaaaagaacatttatttatccttaaggattgcttataagagaagcaaggtggccaggcgcggtggctcatgcctgtaatcccagcactttgggaggccaaggtgggcagatcacaaggtcaggagttcgagaccagcctggcgaatatggtgaaaccccgtctctactaaaaatacagacgttagccaggcttggtggcgggcgcctgtagtcccagctactcagggggctgaggcagaagaatcgtttgaacccaggaggcggaggttgcagtgagccgagattgtgccactgcactccagcctgggcaacagagcaagactatcacacaaaaaaaataaataaataaaaggcaagatatatggtatcctggttggaattgctacaactggttttcctttttggcctgcaagagcaaaggaattgtattaaagatcacatgagcagaaccactatttacaatgtgcatagccccttgacataggtcagtttgttgtttgagacatggaaataggcaagacaccctaaaactacattttagcaaagtatccatctccatagctgcacactatggggctgcccataattgaaccgcctgggtacaagagtcttgccagaaaacaaagtgggtggctggccttgctatgttggatgcacaagacactgacgtctgtttcttttctgtctttcttgttactattaatttttggtccctcaggcaagacctaaattcctaacctaaatgtagctggaggcttcaaaggtgacagtccccaaaaggtcagccatcaaaaggaggtacttctatgaccgaatggccatgcagtttttagaacctggaagtcgtttcagccactggaaagacgggagaatgtatctgcgcatcctcctgagtttccaccagacagcatgctgtgcagggctgcacacacttggtctcctccgcaccatcatctcaaagagcagctgccgtaaatcattcagttaatcaccctttggcagggagagccgtggcagactggtgcttccagttcccagcacaggctcttgctgtttctaatgaggcttcattaacaggtatgagaaggcactgctggccccccaactctgccagggcctcgtttaaatcaggcttcctctcacaacatcccagtacaattacgctttggcagtggttcactgacaggtggcaggggaggctgctgcttgtattggtgtcaaggacagagcatttgttctggagcagaccagagcagggctcccaatggacacctcctgaaacacaaccgagctctatttccacaccaggcaactccactggcctctggcctagcttctgaagggctgtgtgaactcccaatgggattgctagagcatccatggctttcagattcaacattcttttatatcaagatccttaaatcttaccttcatgatcatctgtaacacttcttagcatgtactggtgcccagacattttgatgcactttggggataccaataaaaagaaggcccagtttctgccctcatgggtttacagccttggtgagtgcaggtgtgctcactgaaggatcaacaatgcaaaggataagaaaagcaaagcagacagagcagcacattacagttttcacaaccccttcatagattcattttgtcatcaaaggtataaaaatagacatctgagtctgacctcacttggttttcagcaagttgatttagcaagaaccatcaagcaccatgcctgtctctgattgtctccacacaccccatagatattattttataaacccttacattgtcttgcttgttttgagaaaaggatgggttgtttctttggagacaaatctagaatcttatctgggattgccagacttaggaaataaaaatatagaatgcccagtttaatttaaatttcagataaaaaaaggaagaggtttttagtataagtatgtcccacatgttgcatgagacatacttatgctaaaacattagcttgcagctgtaataatatcagacagaagcactccatacttcgtattccccacatagttatctgacatcaagcaattcataaaggtttgcctagcacttccagttgggacatcccaatacacaagaaggggaaaggatgacccagactgtgtctttacccattcttgattggaaactcagtcccctgacacaaaagcaccatcgtgtttgagaaattagtctgctagtttagtgaagaactaaagcaaactgttttctcagctgaagtaactggtttgattggatcatatcgactggttattttgaacaaaaggttgagcaggaacaggaatagatcccagcatagacatgtggtgttgcagagtcaacagagtttttgctatcatgcccaagaggaaatattccattttctcctgctctgagagtggaaggtaatttgcaccacagggagtccagttttcagtgtaattctgggattggaccaaaaaacatgttgcatcttaaagaaagggctttgcaaaatggatgagcaaaaactactaaatttctttggacaagtcatgcataccttgtttttgttttgtttttatctacagctaaagttcttactgacatcctagacaggaaaagtgtataaatggggttcacaactttaaactaaaaagacaaaggcaaacctgacaagatgattaagacaagttgtcactaactccctggatgataattaatggtgttgtggttgctttgagaagaaaacaaaaggagaggggacaggaaatcaatagactagtggtaggttcagcccctcattgtttagtaccagcaaccaaaagaaaagaagcaagagaaacacgtagggtaataaattgtcctgaggaagtgaaatagtgggtttacacattattttgggaattcagtcttagcagttcaccagagcaacaatcatgctgagtagtggaaagctccctccaaaactaaatccttttcctcaataaatatttatgcagtccctgttatatgtcaatgccatgttagaggccaagaatatgaagatgtacgaaatgtgaacctgcccttaaataatctagattagcactgtccaatagaaacagaatgcaaactacatatgtaattttaatttttctaatagccatatctcaaaaagggaaaaataaacaggtgaaattaattttaatatattttaatcatcttgttatgtccaaaattctattatttcataatgtaatcaatatttttaaattattgagagttttatatttttggtactaagtttgaaatctggcttatgttttaccctaatagcccatctcaattcacatactaaatcttcatcagaaatacttgagctatatttaaatttcataaaatttatagttgaaaaagtaaattgacgtacccaagctgttccaaacatacttaaaagttttccaataactgaatttaagatcacaagatttgttttcctttgatcttcatatccacattgacataaagtggttcatctttttcagaagagttcgtgtgactttgaagcaaaagcacatcagtttcaaaaccacacctgtctaagttaagtaaattcattaagtcttgcatctcattcagtatttattaacatcatgttcaaggaggtattacatatattgagaatcaactctaaatgtatcaacataaaaaatcccatttcaaatttttcttataagttttcaggacaaatattttacacagcttaagattttaattaaatttttaattaattaaaattaaataacacttaaaattcagttcttccgtcacactagtcatatttcaagagctcaatagccacatgtggccagtggctaccacaatggacagcatagattaaagttgactagaggtgggtgggatctacaatggatttgaccagcttgtgaaaacaatcgaggtcatatttgcacgataatttgtgagaagtcctgctttcccaccaattttcctcaccaaatacaactgaaattcctggcaggtgagcgtcccacctagaaacagagtggctacattccaacagttttataggcctcctaattggcccacgtaatccttctactgctgaaattcctggcaggtgagcgtcccacctagaaacagagtggctacattccaacagttttataggcctcctaattggcccacgtaatccttctactgcactgcactgcttctcataactagctcttttggagggagtttcctctaccagagaccttgagcctcccctgacacaggccttttgttttctttcatacccctctcctttccttaatctcctaaccacataagccctgggagaagtgagctgaatcaaagaggccagcacggcctaacagccagcccccacctgctcagtcagactattctgccagtctcttctctccctcatggtgattttctctccaaggtctcataggctgtctctcaatctagcttcaggacccacctcaaattacatcagttcttctgacagctctgaaccctatctctgggctgaattctcattcctgtttcagccccatgcaaatcaaggcaagtgaccaggcatctgtttcaacatccccagacactttctgagctttttttaaacatcatacacaaatcactcaatataatccatcacataaacagaaccaatgacaaaaaccacatgattatctcaatagatgcagaaaaggcctttgacaaaattcaacaccccttcacgctaaaaactctcaataaactaggtattgatggaatgtatctcaaaaaaataagagctatttatgacaaacccacaaccaatatcattctgaatgggcaaaaactggaagcattccctttgaaaaccggcacaagacaaggatgccctctctcaccactcctattcaacatagtgttggaagttctggccagggcaatcagacaagaggaagaaataaagggtattcaattaggaaaagaggaagtcaaattgtccctgtttgcagatgacatgattgtatatttagaaaaccccatcgtctcagcccaaaatctcctcaagctgataagcaacttcagcaaagtctcaggatacaaaatcaatgtgcaaaaatcacaagcattcctatacaccaataaagagaaacagagagccaaatcatgagtgaactcccattcacaattgctacaaagagaataaaatacctaggaatccaacttataagggatgtgaaggatctcttcaaggagaactacaaaccactgctcaatgaaataaaagaggacacaaacaaatggaagaacattccatgctcatatataggaagaatcaatatcgtgaaaatggccatactgcccaaggtaatttatagattcaatgccatccccatcaagctaccaatgactttcttcacagaattgcaaaaagctactttaaagttcatatggaaccaaaaaagagcctgcattgccaagacaatcaaaaagaacaaagctagaggcatcacgctacctgacttcaaactgtactacaagtctacagtaaccaaaacagcatggcactggtaccaaaacagatatatagaccaatggaacacaacaaaggcctcagaaataacaccacacatctacaaccatctgatgtttgacaaacctgacaaaaagaagaaatggggaaaggattccctgttgaataaatggtgctgggaaaactggctagccatatgcagtaagctgaaactggatcccttccttacaccttatacaaaaattaattcaagatggattaaagacttaaatgttagacctaaaaccataaaaaccctagaagaaaacctacacaataccattcaggacataggcatgggcaaggacttcatgactaaaacaccaaaagcaatggcaacaaaagccaaaattgacaaatgggatctaattgaactaaagagcttctgcatggcaaaagaaactaccaccaaagtgaacaggcaacctacagaatgggagaaaagttttgcaatctacccatctgataaagggctaatatccagaatctacaaaggacttaaacaaatttacaagaaaaaacaaacaaccccatcaaaaagtgggcaaaggatatgaacagacacttctcaaaagaagacatttatgcagccaacagacacatgaaaaaatgttcatcatcactagtcatcagagaaatgcaaatcaaaaccacaatgagataccatctcacaccagttagaatggcgatcattaaaaagtcaggaaacaacagatgctggagaggatgtggataaataggaatgcttttacactgttgggagtgtaaatcagttcaaccattgtggaagacagtgtggcaattcctcaaggatctagaactagaactactatttgatccagcgatcccattactgggtatatacccaaaggattataaatcatgctactgtaaagacacatgcacacgtatgtttattgcagcactattcacaatagcaaagacttggaaccaacccaaatgtccatcaatgatagactggataaagaaaatgtggcacatatgccatggaatactatgcagccataaaaaaggatgagttcatgtcctttgcagagacatggatgaagctggaaaccatcattctcagcaaactatcacaaagacagaaaaccaaacacttcatgttctcactcataggtgggaactgaacaatgagaacacttggacacagggcggggaacatcacacaccaggacctgttggggtggggggcgctgggggagggatagcatcaggagaaatacctaatgtaaatgacgagttgatgggtgcgcaaaccaacatggcacatgtatacctatgtaacaaacctgcacattgtgcacatgtaccctagaacttaattttaaaaaattgttttaattgaggtaaaatacacatacataatttaccatctttaccatttttttctttttttttttttttttttttttgagacggagtctcgccccgtcgcccaggctggagtgcggtggcgccatctcggctcactgcaagctctgcctcactggttcaagccattctcctgcctcagcctcctgagtagccgggactacaggcgccctccaccacaccggctaattttttgtatttttagtagagagagggtttcactgtgttagccaggatggtctcgatctcctgacctcatgatccacccatcttggcctcccaaagtgctggaattacaagcatgagccaccacacccggccccatctttatcatttttaagtgtatacttcagtggtaataaatacatttgtattctctttttttcccttcattccccttctcctgtacccttcttggtctctggtaaccaccagtctattctctatcttcatgagacccatagttttagctcccacatatgagtgagaacatgacatgtttgtctttctgtgcctggcttattttacttaacataatttcttccacttccatccacgttgttgcaaatgacaggatttcattcttattatggctgaataatattccattgcatatataccacattttctttatccattcatccactgatgggcacttaagttgactacatattttggaaggttttttttgtttttttttttttgagatagagtggcactttgttgcccaggctggagtgcagtggtatgatctcagctcactgcaacctccgcctcccaggttcaagcaattctcctgcctcagcctcccatgtagctgggaggtgtgtgccaccatgcccagttaatttttgtatttttagtggacccggggtttcaccatgctggccaggctggtctcgaactcctgacctcaagtgatccgtctgccttggcctcctaaagtgctgagattacaagcatgtgccaccaacccagcctgactacatattttgactaatgtgaatgatactataataaacagagtgcatatatctcttcaatacactgattcccttccgttggggtatatatctctagcagtggaattgctggatcaaattttagttttttgaagaactttcatactgttctccataatggctgtactaatttacattcccacaagcagtgtaccaaggttcccctgtgtccacatcctctccagcatttgttattgcctgtctttttgatacaagcttttaactggggtaaggtgatatctcattgtggttttgatttgcatttccctgatgattagtgatgttgagtattttttcatatacctgttggctatttgtatgtatacttctgagaaatatctattcagatcttttgcctatttttaaattggatgatttgtgtttctgctattgagttgtttgagctccttatatattcctgttgttaatcccttgtcagatggatggtttgcaaatattttctcccattctgtgggctgtctcttcactttgttaattgtttcctttgctgtgctttttagcttcatgaaatcccaattgtctatttttgctttggttgcctgtgctttggaagtcttacacaaaaaatatttgcccagctcaatgtcctggaacatttcccagtgttttcttctagtactttcatagctttaggtctttcatttaagtctttaaaccatctgattttatttttgtttatggtaagagacagtggtctagtttcattcttctgcatataattagccagttttcccagcaccatttattgaagaagctgtcctcactctattgtgtattcttagtgcctttgttaaagatgagttggttgtaaatgaattgatttatatcttggttctctattctgttctattgatttgtgtgtctgcttttttgccagtgccatgctgttttgattactatagctttgtagtgaattttgaagtcaggtagtgtgatgcctccagctttgttctttttgctcactattgccttggttatttggggtcttttgtggtttcatatatattttaggctttttttctatttctgtgaagaatgttattgctattctgatagggatttcattaaacctgtaaattgctttgggtagtactgttattttaacaatattaattcttccaa

SEQ ID NO: 2420 - DNA, 207 bp, Homo sapiens
ctgggagtgcagatttctgagctgtactcaggatcccctgcatcagagcccacattttctcaagatcctaagcaacaggcggaggtggcccacatgtcccagacccaggaggagaagctggcagctgccctcagggtggagttacacaacacttcgtgccaagtccagagcctccaggctgagacagaatccttacgtgccctggta

SEQ ID NO: 2421 - protein, 38 aa, Homo sapiens
MSQTQEEKLAAALRVELHNTSCQVQSLQAETESLRALV

SEQ ID NO: 2422 - DNA, 1620 bp, Homo sapiens
agacagcagacaaagcagccccagggataggggagattccagagaggcccgtgaccaggccacagggatgctggggctgtaaaccaaaagccactggactctgtaaacccactgggcaccacagaggcagaaggggtgatgagtgagaggcgagtggtagtggacttgcccaccagtgccagctccagcatgcccctccagaggcgcagggcgtccttcagggggccacggtcatcatcctccctggagagccccccagcctccaggaccaatgccatgagtggccttgtccgagcacccggggtctatgtaggaacagcacccagtgggtgcataggtggcttgggtgcccgtgtgacccgccgggccctcggcatcagcagtgtcttccttcagggcctgcggagctcaggcctggccaccgtgccggctccaggtttggagagggaccatggtgctgttgaggacctagggggctgcctggtggaatatatggccaaagtgcacgcccttgagcaagtcagtcaggagctggaaacacaactgcggatgcacctggagagcaaagccacacgctcgggaaactggggtgccctacgggcttcctgggccagcagctgccagcaggtgggtgaggcagtcttggaaaatgcccggctcatgctgcagacagaaactatccaggccggagcagatgactttaaagagagatatgaaaatgagcagccatttcgaaaggcagcagaagaggaaattaactctctgtataaagtcattgatgaggctaatttgactaaaatggacctggagagtcaaatagaaagtctgaaagaagaacttggctctctatcaagaaactatgaagaggatgtgaagctgctgcacaaacagttggcagggtgtgagctggaacaaatggatgctcccattggcactggtctggacgacatccttgagacgatcagaattcagtgggagagagatgttgaaaagaaccgggtggaggcaggagccctgctccaagctaagcaacaggcggaggtggcccacatgtcccagacccaggaggagaagctggcagctgccctcagggtggagttacacaacacttcgtgccaagtccagagcctccaggctgagacagaatccttacgtgccctgaaacgaggcctggagaacaccttgcacgatgccaagcactggcatgacatggagctccagaacctgggcgctgtggtcggccggctggaggcggagctcagggaaatccgagcggaggcggagcagcagcaacaggagcgcgcgcatctgctggcccgcaagtgccagctgcagaaggacgtggcgtcctaccacgccctgctggacagggaggagagcggctgatggagaaacttcctctttttcatgaagaaaacacccttcctcaacagctgacccaagaagttgcttgaggagctttctcctgagctccagtccctgctggattccctggttaattcagcttgagctgaaaagcttcctggaagtggagaggatccttctgctttaatctgagtagtctgtagcttgagcaatctcccttgtcctccttcaaataaatgctttgtgcgcagcgtc

SEQ ID NO: 2423 - protein, 411 aa, Homo sapiens
MSRVVVDLPTSASSSMPLQRRRASFRGPRSSSSLESPPASRTNAMSGLVRAPGVYVGTAPSGCIGGLGARVTRRALGISSVFLQGLRSSGLATVPAPGLERDHGAVEDLGGCLVEYMAKVHALEQVSQELETQLRMHLESKATRSGNWGALRASWASSCQQVGEAVLENARLMLQTETIQAGADDFKERYENEQPFRKAAEEEINSLYKVIDEANLTKMDLESQIESLKEELGSLSRNYEEDVKLLHKQLAGCELEQMDAPIGTGLDDITIRIQWERDVEKNRVEAGALLQAKQQAEVAHMSQTQEEKLAAALRVELHNTSCQVQSLQAETESLRALKRGLENTLHDAKHWHDMELQNLGAVVGRLEAELREIRAEAEQQQQERAHLLARKCQLQKDVASYHALLDREESG

SEQ ID NO: 2424 - DNA, 130929 bp, Mus musculus
  misc_feature (1)...(130929): n = A, C, G or T/U
acacagatgacagggactcaaaaaggggtgggggtggggttaaaaaataaacttcccactgtcaatcatcaaacacagtactaggtaggagaaggtggcacatgcttccaaccccagcactcagaggcagaggcaggtggatctctgtgagttcaaagtcagcctggtttacagagtgagttctggaatagccagggctacacagagaagccctgtcttgaaaaaccaaaccaagccaaaacctacaaccactatgactaccaccaacacagccctggagacacggtgccccttacaaaatcaaaacaatttatcccaaagttgtgagctgataacccactgttctctaaagtaagcctcctgccagattgtcgtccacaaaggtggagggagatgtcagccctttgaatgtggactccaactctctcaaaaaaaaaaaaaaaaccataaaaaaactggcctcgtgaaaaatgtagcacaagccatcagacagtgggctatgtcatgaaagagcagagagacttcctacatttcccagcaaatcagctctggtgtgggaactggaccactgatctcagcagcacggaagctacagaacagctggctgtttttccctgtaaacgagatgatttataaaacagtaatactgaacagagagtgatacaaaggagggtggggggaaaagaggaacagaacagggcgggatccacccatcatctatttggggttttattttatctttttctataacagacattgaaggttcttattctagcaacttaagacttcttgatgacacaagaacatggaaaaggtagaaaccttacacacacacacacacacacacacacacacacacacgcaattaaaagcagagactgaaatgtcagcaaaagttgttgttttttttaatcctttttaccaggaaagccattgtggaactattgtttgctggcctaacagaaatgaaaccaaggctttcactaaagagtctcttattcttctgccaaatgctgaatctacagccccgtttctgcaagcgcttgcttaatggccacagacagcttctgtttgatgtagtgggtcacatggaagaagaggcctaacagaaagcagggccaggcagaaaccaaattagtcctttgaaggcttcctgggctggcctcacaccaggcatctccaccaggaactgttagctttctccaaagctgtttggtatttatttcatgtcgtggggggaaaaagtaatgctttgtaaaatctccatctttctcgttggacagagaacatcagccactctcagtaagtccttctgagatctctccttctctaggaatgatgatatttttctttagttttattttatgtgtatgggtgctttgtttgcgtgtatcggtgtaccagacacatgtaatatccacagggacaagaaaagggtgctcattggattccctgagactggagttatgagccgccatgtgggtgctgggggttgcacttgggtcctctggaagaatagccatcactcttagtagccccatgattattttttataagtcaaggctggtcttgaacccaggaggatctacttgcctcagcatcctgagtgctggggttaagggttaagggcaggagctaccataccaggtaactcactgattcttaaactgtgacagccttacctgagacgcacaatcaagttccaatgaaagctccaataagcaacctctgattccagggacttgtgaggtctgggaagccatgtggttcatctgggcccttcagaggcagggctgcaggttattccttcatcagagatgctctggactagagcgagatgccagggtggcagaaggaagtcatgccactgtaatgatctgcgacggttgttacaagacacgtggtgtcagttactttcccattagttgctttcctattgctgtgataaaacaccgtaaccaaggcaacccataaaaggacaggtttatttgggcatatggtttctgctggataagagccattactatcaccaggaagggacaggcatagtgacaggcatggaccagcaagctgagagctcacatcttgacctgcaacttatgaaacagagagagtgtgcattgaggatggccctaggctttgaaacctcagagctctccctgaggccacacctccaacacctatccaaatagcaccatcaaccgggcctacttcaaccatgtattcaaacatcaaccacgtattcaaacatctgaggctacagaggacattcttactcaaaccaccacagacactggcctacagagcttgggattccattgagtgtatttaggtcaactttccctcccatcttgtttgtggtaatggatttgccatctcccagaaaatctgcaataaagaatggtcaagcacaaagtgacagaaggcaggcagcacaggggactgggtgcagctctcagtggaagctagaacaatttgatgttgtggcaacgcaatgctgttgaaaccggtggatcctggagaatagcaatgagtggactccaactctcccgggagttgaacgactgactgtgagtcaggttccttggaggttagggattgtccttgtgtgccttttttcgttgatgtgatcatcatgatcaggagtaacttggggaggaaagggtttgtttcctcttacactttacagctcagtgaggggagcaagacaggaactcaaggcaggtacctaagtagcaaccatggaggagtgctgctcactggcttgctcagctgtctctcttatgcagcccaagcctagctgctcagctgtgacaccatccccagtgggctactcctacatcagtcaacaggcaagaaaacgactcacaaacatgcccacacaccggtctgatggaggcaattcttcagctgagattcctcttctgaggcaggtcaggcttattatgtcaagctcacaaaaactaaccagcacatgggtaataaaaaaaaaaaaaaaaaaaaaaggcagaaaaaaatgaagctaaagagaaagaaaagaaatcaattaaacagtcttgaagatgaaagcagccaccactgcccatgtttcggtaagccaccacctctattattagcaaatgcacaccacacagccatctgctcctttcttaaaatacttggagactcggcccggttttgggtgtggagttaagcttcatcttttcctcaagacacattgaccagagggagagaagaggcgaggtaagggttgggactcagggaaaacaaagaaaggctgggcagctcccctggctgatcagagtccacagcctgatctgttaatctgcctgccgccgcagcagagcccttcacaacagctgttatcatgaaaaattagccctgacactgagatgggggggtgggggggggggagaatgaaactcctgttcttggtctgcggattttgaccacacacagttctcgctcctttgagtttagcttactctgcagttttacttcccttttgtcaccgatttccacgtcactggaaacagtgcactttcttttaatcctgaggctccagatgggatgaaacaaagcagagtacagatgtaggaaagcaatgctttctgtacttgacaatgcttgctattgaaatgtcgtattcttcctaggcaaatggatggacctggagggcatcatcctgagcgaggtaatccaatcacaaaggaactcgcacaatatgtactcactgttaagtggatattagcccagaaacttaggatacccaagatataagatacaatttgctaaacgcatgaaactcaagaagaacgaagaccaaagtgtggacactttgccccttcttagaaatgggaacaaaacacccatggaagaagttacagagacaaaatttggagctgtgacgaaaggatggaccatctagtgaatgccatatccggggatccatcccataatcagcttccaaacgctgacaccattgcatacactagcaagattttgctgaaaggacccagatatagctgtctcttgtgagactatgccggggcctagcaaacacataagtggatgctcacagtcaactattggatggatcacagggcccccaatggaggagctagagaaagtacccaaggagctaaagggaactgcaaccctataggtggaacaacaatatgaactaaccagtaccccggagctcttgtctctagctgcatatgtatcaaaagatggcctagtcagccatcactgcaaagagaggcccattggacttgcaaactttatatgccccagtacaggggaatgccagggccaaaaagggggagtgggtgggtagggaagtgggggggtgggtatgggggacttttgggatagcattggaaatgtaaacgaggaaaatacctaataaaaaattaaaaacaaaaagaaatgtcatattcacagatgcttgatggctatgaagagttgacttaactagcagtcactatcaacaagaagatcaaatgatggggctgaagagatgtctcactgggtaagaccacaggctgctcttctagaggacccaggttcaattcccagcacctacatattggttcacaattccagttccaggggatctgatgccctcattggccctagataggtacaagccaaacacatgatatgaagacatacatgcatccataaaataaaataataaaatagaatgttttttaaatcattaaacgttgtattataaagctgatgttgataaaaatgaaattcaaattgcaggccttgcatgccattctcgggagatgctggtaagcacagctatgctgttctacattaaactctctgtgcaaacttttcttaagatgatgcccagtggttacacctgaccaatgggagaggaggtcatagctattgcagtttatgtttatctgagtacagtggtacagaacatgaatgttgaaatccaagagtcctgcaagagacattactgttctccagtgacctgatgctagaaaagttgcatgcacaccatcttgtaagtgttgggttcctaatgtgaaaaatgggggaaatggcagtgtcgtgtgtgtgtgtgtgtgtgtgtgtgtgtgtgttataaaaattaaatcaggagaacagagaggtagctcagctgtaaaaagggcatgtcgctctcacagaggattggagttggttccctggacccaggtggtggctcacaaccatctctacctcttgttccaggtgatctgatgatctttgacctcatcaggcatccagaatgcaaatggtgcatatacaaacaagcagacaaaatactcacacataaagtaaaagtaagtgtaaaacatgaaattaaactagtaggtggagagacagcttagtcagtactatatacagtgcaagcatgaggatcggagttaaatttgcagcacacacagaaaaacccagatttggtggagcgcatctgtatctgtcagtggggcggctctcctgccagttagatgctcttaaaaacagcggggaggccttgtctggtggatagatggcttctggggaccagcacccgagagcttggcctctggcctatatgtatgtgggcagccatgtatctcctgccaggattaaggagagcagagagtgtgaaaaggacctgatacattgcttcttaagatacaaagtaacgacaggctgatacaaaagctgacctctcttttccttgactgcctgggacaatacgggaaaactagttacttactttcttggaaggtgagccacattagcctttttcacctgttgcctaggagtctttcagctttcagctaaagcagcctggctaaagcaccagagagctgcagccaccttggcgcttcctatcctcatgactggcaacatttttgcaagacctgggcctggtccagttttatagcttggttgctgtcttagttacctttcttcctgttgctacaataaaatatcctaacaaaagtaactcgaggaaagaaaggaggaatgatttgggcccagaattctaggtacagtccatcacggagggcaagacaaggcaactggtcacactcaacccacagtcaagaggcagacgctgatgaatgaaatgggtgaactgggttcagttcgttcctcctttgtctacagcccataatcccagaccagggaatggtgccagccacagagggcgagtttcccacatcaattaaccaaatacagataatcactcaccggaatgtcccttttaagaatagccgagactatatacttatttctgtatttggagttgagtctgacctctgtgtacatagatatcccactgaaatgttccggagtttcttatcgggctttaaggagttcagggtaagtgtcctttctttgaaatgcttttgtcaggagtctttcaggtttcattcttaaacgggagctagagtgtgagtgtgtagattttaataggcggacatccataattgaaaaactctgaactatgaaatgcaccaaactctgaaacgtcttaggtgctgacataaatgtgaaattttggaatatttcagattttctgataagagatgtccaacaggactggtgactaacatctagctaaacatatattatattagttgcttttctgtttctgtgatagaacgccatgaccaagtgtgtttatttgggctgatggttctaacggggccaaaggctgccatggtgggggagcatggcactgattagcaggtacgggcatggcagctcaagcaagatgctgagtgctcacaccctttaccataagcagaaagcagactagaggtaggtgaggcttctctctctctctctctctctctctctctctctctgaagttaaaccattttatttgagaaaagagggcagacacatgaaccctgccattcttgtgggggaggcggcagcaatgtccatatccaggggaacctgaacatgcaaacagcaccacgaattcatggacactggataaaaactctcaaagcctgtttccagtgacacgcacacctcctaaaccttcccaaacactgctcccatctatggaccaaatgttcagatgcctaagacccgggggctacgtctcatcccaccacacatatcatcgataacacattattaagtgctatcttgcagttttcaaattaattttatttcatgttcagtagccacatggggatggtggttaatgtgtttaaaacagtttatctggatgtggtcatgactgtccatgaccaaagcattccaggagctacagaggtggcttagatgtttaaagcacttgttgctcttgcaaagacactggattcaattcctagcacccacatggcagctcaaaactattcatgactctagttccaaggcacacatctgccctctgcacacaccaggcatgcaagaggtacacatagagataggtgggcaaagcactcatacactaaaataaatctaataatgttttaactaaactaaacccacagaactccaggcaatgacaaaggaggattgaaagattcaaggctagcctgggaaacagagcaagaaaccatgcctcaaatggcaaaacaatacaaaggcagcagtagacagcaagatgtggatcgaaacactgcggcatggtgtagagttcttagtggttatattgggtctgggcatggatatatttaggaagtccacttcaacagtagcagggaactcaatgaacaggctttgccatgtagatcttttaagatcttgaacgtctcctgtgttggatgtcgacttagaacacagataaaattactgctgtctagaaagcagtgaggtgtgaattttaaaaagtgttgaaatgatatatcatcgcacaactttggtatgaaaatttgataggtgcgcactatgaaaaaaggtatctgcaattgtatttgcgatcatgggcttcgaaggaaaaaagataaacgcagaaagagaagtttgaaggtctaccttgaacttgacaccctttcaaaaatgttgagggggtggggagccaggtaacttaacagaagtctctggaaagatgagccaagtcttcctactcatcccgattcttgtctctagttctagcatcttaagaagagtgacaactttatgcaaatctcactaagggaaatgaggaagcagcacagaggctggcaggtggaaacacaggaaagggtgggatacgatgatatgggcaggtggactggcagataatgaaaggctgggacacagaggaggaggaggaggaggaggaggaggaggaggaggaggaggaggaggagagaagagcaaaaccaaccattcaaacctggaaatgatttctgcaagagaaggcttatgggaagaatacagtttctccacttcaggatgcgttcagaggcagggaattttccactacaggggacggaggcagttcatgttacctaagctcctttcacctctgagaatccatttatttggttccaaatattaaatagagaggcagtgtcaagggtttagtagtttgatgacctgggtgttacagtctggggccaaatctcggctcaaccttttggatgaacctcaccttgatttagtcacttaggaactctgggtcagccttttttaccaaatagaaataggaccgcccacacctagttctggcaatactctaagggtctgtaacatatacaaagccacgtaagcacatgcttttattaccctgggataggccaagggcatcttgttttgtttttcattgttgttttttcccctttccactctacttcaggtctcatctttccaagcaagccatttctggctgctcacaggcacttttatttcactgggacagtgtgggaaagccttcctaaggaaaaatctagtcgtctccagtaacacaaatgggtcagtcggccaaaaagtcaagtctgtagaaaccattttacatgtttttcatcccaaaacctccatctatgaaacgattcaaccacagacggggtccctgagaaattccagttccagggttgctacacaataataatattaggctcaccagagcatttaaacctagaactgtgtgtccatacaagtttttttccccccacagaatcacgttttagagggtagtctgcccctctcacatcttagatgagacaccgtctgttgctcagagctctgacacaattgtcatctgtaactttgtttcattctgatactgtcactctcctgagttcccctcttcatatagtttcagtgagttcctatccagagagcagttcttgagtcaacttacttgagctcaaatactaagtctactactgtggaactacacatcaatttattatctgaaaatagaggataatccctatctcagacggctgcaagttaattgaccttaagtagttggccaattaaatcctggctctgggatcagaggtccaggaaggcagcagtgttaactgtcccaacacttcacccgcaaaggcctttgacctctgaggcttcggtctccattatctccctgaacactcaaaacttaaatccgcgttcagggtgtgtcagtagcgagtaaaagttatgcccacgatgcagctaaaccagagatgcgcactgaggctttcgacggcttcgtggatgcgccaggacactgaagactagggctaggtaacagagctgctcctttgcagagttacagtagccaatgccagcgtctggctgagaggcgtgtctccagggattcagggggcgtggcctctcggaccgctccagggggcgtggcgcctcgccttctgcttgggccaaggctctctttcgctaagcgcacgcgtacttcccgagaggcggaacggcgggcggcgcgcacgcggcgcttcccggaagacggcgaatgggccaccgagggagggagcacagtgctcccgagggcggggcgcgaggcggaagcgccgaggtcagctgacagggtctcgtgacggccggggcggcggccacgcacgcgcgttagggttcagcgctcgcaagcctggtggaagatgggcggcgtccagggcgagcctctgagaggcaaagggaggagcggaggggtgggggccgcggcgcaggaacccgcggcgacaggccccggcggggaaaaggaaagcgagaggggacggggccggcggcgcctccatcctactcaagacgnnnnnnnnnnnnnnnnnnnnnnnnnnnnnnnnnnnnncgaaggtaaagccgcctccggctctgggtttatgagatgccgcttcccaccttcggggacccgggggctccgggcagggaccccagagcgggcggcgttaagctgctgtgtgtggctcgaacctgctgaagccgcgatcctccgtccagggatccctgcgctcggaccctcccctcccccggctctgagtgacatttgcccggggcactgcccggcagccccacccctctctctgcctggccgtcttttctcccatcactatccctgtcccccacttctctcggcaactctccccgactcaactccacacctccttcccctgtgggctccgccctcgggattccctcctggatgccggcgcctccggttttcttaggttagcggtcctgcttccttcctctggggtcccgcgtagactcgatttttttttttttttctttcttttttcctcgtctcagttttgtttcgatttgatgggaaaggaggggcagctgctgttctcttcctcaagtcctttatcaaacaccaagttttccccccaaggcttttccttcttgtaaagtagcctggcctgttcactgttgcccgtgctgggctgtgatttcacctctgaacgcggcttttggtgtaggtgaagcagcactttggacgcccaatgaagtgggtgttgagagtacacctgcgtgcccccgccccccaaaaaacccctattgtaagatgctaaattagccactcttaccttgaaaccgtttccctaatcacttggtggaaggatgatgtaaataaaaatcgccccctaacacagagatgaactcccaaagtagtgattttttacttccacgatctgcttttcccgtttattctatagtttagttttttttttgttgttgttgtttctagtgcctcattgtttaacttaatttagcttacagcataaaagcccctttaattttcatatatagtataaaccaatgtttaagttgcaatatcgcaaatggtggctctggctgttaataccacattacgttcagggacgggaccgccagtcctagttgagaaaacactgagttcacatttgtttggaaacaggaagtacaaacaaattaaaggagaaaaagaggagccagagttaagaaacagggatgtaaagaccttaaagctagcttgagtcctgggccaataccagcattcgtattcccccgagaaactatggatattcttttctaatgcagtagtagtagtgtaaatcatactagcaagcgtgactgcaaacaaaccaagttctaaaacgtgaatgtgcacagtaataaagttgcacactggtggagagcatgaattatttggttacccaggcagatggtaataacctgtttttcttaaacttagaagaaaggttaatagtggaacctagttcccaatagatactaaggtagagttgaaatcaaaagatcatgttatacctttgttggccccattcctccagcacttgtaattacacgggtgagtttgcaatgtccctttcagacttctctcctgcttctctgaggaaagtgtaaacagaattatgcagctacatggcagcccagttttgcttgttgctaaggctttggtctaatatctggtgggagttaaagtgcagtttttagttcattatgtttgttttagtcttcacatattaggatcatttttttgcacttagaatgttgtttgtatttattctgtgtgtttgggtccatgtgccatgtagctgtgtgaaggtcagaacaacttgcagaagtgcagtgtgtttcttcacggtgtggagcctgaggcttgaactcaggtagtgagctgtaatggtgtctccatcagtgtgggacaggaggattgagctcgggttgttaggctcatcgggaggccttgtaaaaccttctcctcagcctttttatataagataattgctaacatgctctttgctagcctgaagtcgtttgtactgtttagctttgattctaagacgcaaagctttgctctaagctttacagcatggaggaggggaggtgtgagaaacaaaaccaaccaaccaaacaaacaaaaactagacgaaccaaggtgatcacttagagacagcttagagggctgaggacttagagaatcactagctcagctcagacctgaaggaggagctgaagagggaggggtgaaaacgagaggagggcttttggacagtggttaagagttcagctagaacagctgaaaaagggatgcaagtgagtgtgccaacttagaagctgtttacacacaaactgcactgagaacgctcctaggaaaaagtcttgctgaaagtctgtcattcagacccagtggaggggaacagcagcatagcttttaagaaggttgagaaattgctctcattctctccttggataacaaagtttaatgtatatgtgtgggccatattaccagcactattgataataaattatattgagcttagtggaatatggagaaggtaagagtataatactcagaacagagactgcatcctcaaaagcacaaggtcacaggagcacaacacaagggtcagagggacatttctctagttaaatcactctctccacagatacacagtattttgcaaaaagaatgaagccagtggtaccctgctgttaactgttgcaagaacgtagctgagctcaactcctaacaaagttactgtaatctctgcacttggcctcacaaagaaaagggagatgctcatctggtcaggaaattactcaccttagttccactactctatacatgtccagcttccctgagataaggcacagatggaaagctaaaaggagaaaagcaattcctaagagagccgttatcatagctacactcaggttgatggaggtagatgatgttatccaataggcagtactcaaatgctggattcaatgcgtaatttcaaaaacataggcactgaaggaatcgaactgaagtgctggaaacaagatcacagcagagagatgccgagtgcttttgggcttacctgttgtgtcacctcgaggaaaaacccacgacctgtatgtaatgtcaatcgagactactcattctgtctccctaaaacacagatgaaaccgctctaagacttggaaatacaggtggagaggtggctcagtgcataacagaacttgttgctgtttttagagacctgagtttggttctcaggactcacctgtaaccagctagagaggctccagcttcctcttcttatatatctataagatatatacacagagatagtgtgcaagaacccctctctgaaggagagattaaaataaaagggacacaccatgaaaccaaaagataactacattaatagacagaactgactttatggcacattgtattgatgattacaggcaagctcgacacaaaaatagacctagttgtaaaatataaaactaaaacatttttagaagacaagaaaacaaatgttgggactttagtatttagataggatatcaaaaatattcataaagggaaaaatccagtgttgaagttaggccctggttcttcctcccagccccacgctccccaaaataagactcagactcaaagtatatttactcaaagtattatattacaagataccttggccatatagctaggctcctctctgacagataaaacttaaaatatcccatttattccagcctacattttgccatgtgtctgcttacctgtactcaggtatcatgcatcagtcttgtcacatcttcctgggcggatctcctgcctggctctgtcccagaatcctttatctctctcccaaatgtcccacctttgtttcctgcctaatttcgcagggcatggactttttaattgacaggtggtatatcaatacagtacacaagatattctctctaccagacagatttagcaaaaaaaatttaaaaatgcaaacatgctgtatgttaagaaaataaacactcctctctggtggtacataaaggcatttcatgtgctttccctaaaatcgctttgctatgtaaaattgaataaaaacaagacttttatgaaaaataggttagggccacagaactgtgagctttacagtaacagctcaagcagtgggcacttggaagcagcactgtttgcatggatcagtactctggcattttgttagttgcttgtggacatgagcatgggaaggagtcaacagtgtattgagtttctgtgaagtttttgaaaggaaatgtaatgtgttgtgaagttgtgtggtatacgcatggattgaagctctttgatttgtgcatgtacatgctttgagaatttctacatagctgttcagctgagtacttatctacattcatcttatgtttcccagtgatttatgaactagcacatcagtaaatgtgaagttggaatcccactcttccaagtgttgagtatatgctgggcagacactctacttccaacctatagccccagcccagtgtgccagccatgttgaaataagttaagaataaattatcaaaatggcattgtggtaaaactgactgtgcatttcagtatgcaaagaagtttgccacaccacagtaagtaataaattgtcagaaatatgcacctttgtatagaatcagtttgtgacagaaacatgaaaaggcacaattttgtcatcttggtgacttaaataccacaagtggaataattgttagcattgttttccaaactgaaaaggtaagtataatctctcagtttgtagcagctctagtggtgggaagttgatgtagcagagagtttgttttttacatttagattgattaggctgtggggctagtttattatgactaggctttccctatgcaaatgagcacttggacattgaggacaggctttccactttgtgtgtgtctgtgactgtgtgggtgcagttgactggaaggacctatggaggccagaagagggtattggatcccctggatttggagtttcaggcagctgtggattccttgatacaagtacatgaaactgaactcaggccagtcttgtagaccagtggttctcagcctgtgggtcctaacccttttgggagttgaatgaccctttcacaggggccaccgaaggccatcagaaaacacagatattatgttaccgttcataacagtagcaaagttagagttatggagtagcaaagcaataattttatggttgtggaggtcagtacatggtgaacagttttaaagggtcgcagcattagggaggttgagagccactattctggattatcagttcatgcttttaaccactgagccatttctccaggccctggttcaaaattttaatatcttcaacacattttccttctggagcagtgtacttctgctgagtacatgccagccataatccctcttgttacagaaactgattcatcgtcatgggaactccccagagtcactgaattagggaatattctttcagcaactagctgaagccaggctatggtaatggtcatgttcattgacagaagacagacacagttacctgtgagaggttcattcagtgtggcaatacttacacttatttctgtgtgctcttaacttcattcagcagcccatacactgtcatggactgctcatgaaacatgtgatttgtaaaacagggtcaaaaaacagagggctttcttgttttgcctttggtagatcacgccctctgagtagtaagtagctcatgtatgtaactgaggactggtttgcacttgattagcaggtaggaaagcaaacacctaaagcagtctgtagtaattattctaacgctctgcctttacctgtaggtgtcagagcctaaagagctgctcaggtccgttcatctcacgttttgcagggagcaggctttctctaatagatctaagattctatactaactttattgcaagttagacttttataggcatttctgatttgtgttcctttggtattttttgctgtagaattcctctccctcaaacttttaagtcatgcatgattcagagtgtattttgaatatttatcaaatcttagggcagatttcttccagacctttaagtcattgattttatttttaaaagtggaatattcttctttaaagataatgtaaaggtgttgtgtaggttataagccccttggcagaggtagaaataatacaagcatttcagaaagaacaaacatgaaacttggtcctgttgcttactgtcgagtgagaggaaatgtttgccactgacatggcctgtgtctattattaataaacactattatagtgtttattaggcatggggtgctaactgtaaagtgtattcaaactatatttgctgcaggaccaaggagattatcccctgctggtaacagaaaacaagtttcatcacagccagtaacgatctctgttgcccacgaggacctcatcatggtagagctaaacttggaagtgcctgctactgagatgagcttgctcaactagagtgtgttgttcttgcaaaatcaatattctcatttgagatacaatgaaatagaaatgaggtctaaagaagtctaaaaaatatgtaggaactagaatatataaatagcagcacagatttgagaaaaattgagcacatttctgaaaagatgaatattctttcagatgaaattttgcagtttggaaagggcagagtcacaatatatcttacatgaaaattttattttttaaaaaataatagatgaatctatctagaaatgaagtgttctgtcagatggaatcaacatatgtctgactaaaatagaagagatagatgcttccgttggaatcaacatatgcatgattaaaatagatctccctcagcccagcatgtgatttatactgttgaataggtaagacaataagattaactgctgtggcgaggttgggaggtagctcagcacagcatgaagtcccaagttcaatacccagaatctattttaaaaagtcaggtgtggtagcatctgtaatttcaatgctgtcgaggtggagacaagtgggttcctgggctttctcacaaaccagcttagagttaacctgtgggtttcaggccactgagaaaccttgtttcagtttaacaggggaggggtgcggtttctgatgaacaactatggagattgactccccacacacttacttgtatacctgcacacactgctctcgccactaccctcccccgacccccattgggattaacgtagacttggagttgtattttaacctccctttatttcatgaagaaatttctagttattttgactctttaagaaagaatggggcagacgtgagattgttaatgttgccgggcatataatgcaacagcatactatatcttgtggacagctattgggtataggattgccagtcaaacatggtgttacttcttgcttccctatttggtgacagcatttttctctagggatttaagttcttcaggtcaaggtgtgtgaagtgaggtatcctgaaaccatggtgatatgtttcttgctgttttaaggttattgtaggtatcatacacattacacatactgattggttctttctgaagaaaatactttaacttggacttagtcacacattaaagcaaaacaagaatgacctgggtacttatgtcccagctatggggttgactgaggctggaggatcgatcacctgattctaagagtttgaaggccacctaggtaacttaatgagaccccgactaaaaacaaaaaaagaacaacagcaaagcaaaactgggattaaagtccactggcaagtttcctcagtacagcacattttatctaaaacagtttagatgtagttttttaatctggtaaaaattaatatagttagccattttttaaccttttgttttcaaacagttccaagctaattatcattgatagagatttcaaatccagttgtgaaaatgagatgtttaagaagccagtgtatgggattcccccttgaggtagttgccccgagtggcagtggatacatgctcaggggccaggctgaggtctctcctatataaggctgcctcagtgctgactacctctgactgccttgtgggatgtagtgtgggggcggaggtgagcactccgctgtagggaagcttactcaggaaaggcaggcagactcgcagcttctcctcagtgtactgcacacctgtcactccagccacgacaccaggctttgtatcaggcatggccatgcctccctcagcatgctgcggctaataaataccttcctgccatcgctttatcacagttctgtcttttatccagccatccagccagccagccagccagcttaatgtttgatgcatcttaaaacaagctcatacttgtagttcattacctgagagcaagcgctgtgcttagatttcatagactcggaatgaggaaatttgtttcttccctgattattccaaattgtcatatttatataataattactttcaggtagttatgcaaaatacatgctttcaacaggtgaaaaacctttttacttcaattcctttgctcattgattgtattttttaatgtaccaattcatcatccttagctacatagacctttgaatttgttcacacaagccatgcgcatatgcttaattttgctgtacacgcaaccttttccacttacagtctggttgcagtctgctcaggcagtgcctgtgatggtcactccagtctgcttttgttgcggcagcgtacaaaaagttgtaggggctgctaagtggactcagttgttttgtttttgttgttgtcatcaccccttcgtgtgtgtgtgtgtgtgtgtgtgtgtgtgtgtgtgtgtgtgtctgtatctgtgtgtgtctgtgtcgaagtcatcttctcaggaccattctaattttattcacagatgtttgcaaatgggtgccagccttactgccagtaataaattaaagtgcaagactgttgttcgaaagcacaaagcgtaggattcattgaaaagagagatttcagccaaaacaccattagagttgaacctagggcacgctgtgtccctgaggacaccccagccctttttattttgtattgtttgaggcagggtcttgcttttcattcgtttacttattcagactcattctcctgcctcagcctcccaagttccaggcttataaatacacactaccatgtctgccaagcctgaatttgatcttggtttcaacttttattacatttctatcaaaagaattacctgagatgatgcaaaaaagttctagtagtgttctgcccagctatatagtggaaagcattgaagctaacctgtcagtcagtggagacacctcagcatcatttagttacaggggacatgcagatagactcttcaaaggcaagtgtaagtcttgatttgaaattcttgaaggaatgaatttagctgatagttttagcaggtggcccacctaatgggcaaaggctggcaagacaggatcccattctactgtttatcatcctttaagctggcagttatttttagcacatgcctataaacgactcttcgatgctgcttgatgcttcagcctctcagtaccaggagttctgcagtttccttcatgaataataaataatgactgcttaagtgtttttaccctttaactctttagagcttattaaaaatagagaagagataattactggacattaaatttgttcatgaaatttctttttttccctcagaagttcacaaatggttaagtaaaacttatgaatactgattaaattaacagaacactgtactcttgaagttagaagttctaggtgacacacagtgatttcttcatccattgggaataaggttcccagacactcagctgtgtttttcctgtgcagactcacaacagtcacatgatcccttttcatctcacctagtcacttatcagtgcaactgtggcttttgaaattgatatggtagcaaaattcaagatggttcctgaattcacagtccggggaaggtttcttttccccataggccttaggatctttagtgtgcacctcttccgctcctttcactggagggagtgcgttggagcttccccacatgtccacaacattctactttctctactcctgagtggcaggtccactgtgaagtaaagtaagggttccctaacaccacactgccacgtcatagcaggcagtctgatgagcagaggctgccaggtgactgccagtattgtgcacagcatggctttgtaagacagagagttaggagagcgcatcacatgactgagacagcgtgcaatttaaaacttgtggattgtttggttctgtatctgacatagcagataggttgaggtgctctacgttgaattataggaagtttggaattaattaaaggtagaggaagaaccataaatacccgcctactccaataccttaatgcgcccaagtgccagtagatacttggaaataaaggagaaaatagaaattcacaagaatgtgtgtatttaaagcatgatagtcgctaattaatgttcctgagttgtgggttggtttttttttttttaagttttgtgagccagggtgttcctgagttttgttctaagtatccaaattgtttcttttagtccataccacagccctttgagacaggtattcatccctgttttatagatggctgtaacacagagaaattgacatttgttccgagttgctcacagccagtgagtgatagctacttttttaagttcaccatggttaccctggtggtggatgcacgttgacatagggcttatgttatgaatgcagatcagcagccttggcatctgtgccacatctgccaaggtcttctaaagtgactcacctgaccacagtgctctgagcatccccagacttgctgcccctcagattctgtgcttcgatggaagcttttccagcttcccctggacggtcaacagccaacacatcctcttcacctctcttgtctgttttaaagcctgggctggaactaaataggtagcccaggctagcctcaaccttaaggtgatcttcctcccatcatacctgagtgtatttcttgtctttttctgctttttgtgaatttctcttactgtattttgtaagttctgtgtttacacgtatgttgatagtctgaaagagttaatgctgttttcaggccacctgttattcatgggataaattgtctttaaaaagattttcctgagagcatgaataaacttgaaattttagaaaaagttaatgtcatccttgctgggaggtagatcccagcttcacaccaaaatctgttgatttttaaaaggctcacagttaattaaaattctctttttctgaaatctccttgagaagtacctgacgtcctgctctggtagattgagaagtacctgacgtcctgctctggtagattgctgtcacgtgcttgtctggaacacttggaaagttcaaagggtagctagtttaggtggaagtgcttcatggtttgtactcgcaggctgtaaaatggcagtgttagagcctttgtcttgcatttactgcggtcgtttgtttgggtctgcggcaaatttgtagtttcaaaagttatttcttataggtgtttgattcgttccaggtaaaaataataattgaagtaagttttcagttatcccaggaatatgctgtcaaacgatacaagatcacatggtgaaagtggctttcctgaggctgagggaattcagggaagcttgggttaagtgtatagaatgaagagttaagagactgggccagagcctggtccatccatttaattagctgtgtaaccttaggatgtaattgaatttcaacaactctcagttttgttgttaacaatatgggagccatcagggcatcaggatttgataaatgtgtagtagacgcttagtgtaatcactaacaactgagtacgtgggaagagccactgtggaatgagtcttaggacatcacagactccccagctttcagatgtccttcaatgggtattatgagtccattttgaaggcgtgcagagactgatatcaacactgaattatgttatttgtaaggtgacttgctcctgcctgcctgccctcttatcgctcagacatacttacctgaccgtgggcaagcctttggtgccaaggagcagttcctgttcataaagatgacatttgctttactggctttgaggacagttgagcagcaggagcagttgccccagaacagtgcccagagaatgttgagatggttttgaaattagttgtcagatttttatttttttagattgattatttttatctgtttctctatttatttgtctggtgcctatggctggagttacaggtagttgtgagccaccgtggagttctggaaattgaacctaggtccctaacaaaaaacagcctccagggtcatcctctgcaaaaacagccagatttctaaacctctgagccatctctctggtcccagctagaggaatcttgaaattcaagtcctttcctagtctattggtcttttctgccagtgtgctaatctgcattaggaatgtagttttaacaagccatcctggtagcttttgttgtcactttttatagcatgtgttagacctgtctatttgcccttgcctcagaatcctctccgtgtgttctcatccttctgcaagctgtgtggaccagccagtgtcagtgactctcctacattcattcttcagatgtttaagaattcataaatctctattgtcattaattgcaaaattattttgcctttggccccttgtagatctattagggatcatgtcttccttatggctcataccctaagttctatggggttaatagtttaaaatagtcttattttttattagttagttttgagacagggctggctatgtggtcctggcttacctggaagctaagtagccagcctagtgtcattatcctccagcttgggccacccaagtgctgggttctcagtgtgtgcctgtcatcaggactttagggctttgctctcgtttttactttatgataccataatgataccagtttctcctcaaaagcgttctttcttccttttcagtttgcccaaaacagggcttaggtacagactcagacattctgtttcctctagtgttgaccaagaatccacacctcattcttcaatgtcaatttttcacctttctgtctgtctttctcctttatcattccagtccttatttgtagtgaatataagggaaactataatatatatatatatatatagagagagagagagagagagactagggtggtatttgtttgcttgtttgcttgttttgagtctttagagataatatctcagtttctcttcagcaataattattgcaaatgatacagaaggaagggatgttggtaggttcagtaaatcttggttgggtctttgagttatatcaaatgcaaaatacagaaataaagtgtctctcccattcatgagttatatcaaatgcaaagtacagaaataaacaaagtgtctctctcactcaaacaacgttcacaccagcttaaataaagggtcacaccaatgcagtgtcatactagaacaagcaaagaggcccagcagtgtccagattgcatttgcttgatacataccagtaagaaaatgcatgttgattgtaagataaatttcttgttttgataaataacgccatggattaatggtgcttttccagaagctgtgactgcccctgttagagcatcaggctttaggtgcccatcaggatggcccatggaattgtcacactcacacagatgcttgtacagtgtgactgttttgtgttggtctctcttgtagactccagagatgcgttagtggactaataggattattagataaataacaaactgggctttagattgtgaagagtactgagggggaagcagggactaaaggactagggaggagggcaggaaccgtctaaaacagtgtggttaggggtgctctcactgtgaaggagatgaagctgtaagctccacgtccgtgtggagggtaatcaggtggtggaaagcaaagaggacgagtaaagactctccttgtccctgcaggatgttctgacagaagtgacagcattcccacaagagctcacacgtgtgtcatagtagcaccatgtgtactagccagagggtagaaactacacaaatggccctcagtgggtgagtgaacagaagacatagccacacagtagagcattactggcaaggaaagccccttacgtggggaaaaacacactagcagaaagtctgtccgtcactgcggggtgctgggggtgaggagctcaagggtgggactggcagtgggggtcagttttggtctttctttgtttttgagacaaaatctcactgtgtcacttggaactctgtagataaggcgggtctcaaactcagatgtcccatgtcctgagtgctgggagcactgcctgctttcttgttggctaatgagaagagttttgagttggtgatggctgtggaaggtttgtgacaagactaagggagtcctatacttagaagggtgaatttatggttcatgaactagtttcaaaaaaggaattgccatatgtaaagatgtaaagcaggcctaagcaaactctaattcctgtttgaattatttacattttgctcagtatcctacagtaatttttagtagggtcagagagaagggcctacatgacagctgagaagtcaggctccacaaaacgcaggttttgtaaaagtaagttatgctttatctctaaaacatcaccagcctttcgttaggagtcacctaaataccatctttcaaagctacctggatttaaatgttcctccctgtgaaataagtggtttctgggtttgtgtgttgttaggttacaataaaaaaaaatacagcacagctgccttctctgtcctgcactgagtcaccacagattcagcagccctgttccactaaacaggctgctgtaaacgtctctaaactctcagcttcaatctctttattgccgtgataagtctggtaataaacagtttacagaagtagtgctgtcctcacatagctaggaaatggaatatattcagcttaaatattttctcaatgaatattcaattctctggggaaaggcacttccttctgtggaggtgcatgatggtcttctggtgggtttgttttgagacacggtctccctgtatacctctggctaacttggaactcacagagatctgcctgtctctacttcctgaatgctgagatcaaaggtttgcatcaccatgcccagcttgcttgcttggttgttttgagaagattatttttcgaaatataagaaggaaggccacagtgcatgcctttggattttaggatgaaagatagccttatgagccctttagatttatgatcgtggacatgcattactttcctagtttaatgagttctgatttgtaaattcttacttaggaaaaactgttccctaaagtgccaaggacaacagtgtggccagcccttagctgtgcaacagaaaccacctgtaattgatttgactcttgataattaattttaggtttcatcatctatcaaggcactgtctgacagtttgacaggattgggtgtaaagattaagtttcttcatctggaaacctttactagatttttctgtactcaggatgttgatcaaggacaacttttgacgtgagcagcaaagtctagtgagtccaggggaaaagaagtggttgggaagaggatcaggatacagtgctgagcacagcactgagcagtcctgtgtccttaaaccttacagcagtgcagggctagggacctgaggagtgctgtcccttgctatgagggagtcaggaaaagtgagaccatgcaacactgtactaagggaatgtgtacctctgtcttccaggtttcagcacaaaatgaacataattagggaaaataaggatctggcatgtttctacacaaccaagcactcatggaggggaaagtaagtattctttgcttttacttttctgagcttcataaagaatcatttcagtccagtgtcagttctttgatggtgaggcccagcccatcagtgctcttgggctgtctctgctggaaagctgtgcacacattttaaatgtccgtaccacattggaaatgcattgctgtccctcctcctcctcctcctcctcctcctcctcctcctcttcttcctccttctcttcttcttctttttttggttttttaagacagggtttctctgtgcagccctggctgtcctggaactcactctgtagaccaagctgtcctcgaactcagaaatctgcctgcctctgcctcccaagtgctaggattaaaggcgtgcaccaccactgcctggcgtctccttttcttttgatctttctaggtttttccttaaaaaattgaaaagttaacaagagaaagtgcaggggtagggcttgggttgctccagtgttcctgctgcattgccagaggctggcctgtgaagcaaccgtttgcctctgcaataagctgtgtttatttaattatttatttgaataaaaatttttattagaacttttttcttggatggaaacaatatcatttcatgtttatatttgttttagttggaccaagatgtccttgtgtgttccctccccattgggtgatggcaattcgttccccatagattattgtgaagagttaatgaggtggtgtagagtgaatgaaggctatgaaattaggccttacatacattgatagtcactgactggagctccttgactgttagaaaagcagcatattctgagaagcactgaccagtgagtctgagtgtctcccttggacagacaggtttctgcaggccacagttctctgaggtgggtcatgggtaaaacacaacatgtctgcatagcttttgttcttacgcttcgcttttcatggtttggttgatggtgtggtggcttcttgggtaggccaatgttggaacactagtgcttctgacttaccttagcaaactcactaactgttaatttcttgctttatgaacttatatgttagggagtatagtttctacccttgtagaatactgtgtgtgtattctctcataatttcattgagcatagttagagaaaactggtgtttacaaggtggtgtgaatctcattcacccatttttaattaagttctctctccgattgctcagctatagaaattctttactttaaacacaaatcctatcctagatcagtgtttggcacgtattgttccagtgctgagggatgccttccaactctcctgatgccattgtataaaagtacacagtttttaattttcatgaaatccatcttgtcttcttttgtgtctcttgttctttttgtcatttgtaagaagcaatctaaggttacaatggatttccttttgtgacttctataactttaattttaattaattttatgtggtgtgcaatgaagatctacatatacttgaatcacttgttgaaaagaaaagaccattcttttcccattgaatgtttgacacccttgccaaaatgtgaattctcaatttgattccattgatctggatacccatctgtgataaagtccctaatgtgttggtttgatttaatgtagttttctaccctttgagacagggaggtatgaggctgcaacctcagagtaatgttgactattctgcatttcttgtactgctgtatcactttttcagagaattgttaatctcactgcaagtggctggggttttagtggcgttgactcggcagagctaatgtttcccacccataaacagaagaccttccacttacttggcggttcctttcaacagggttttcttttcaatccccttttctcagtggtttcagtttgctgtgtgcatcgtgcagcactaaaatccattgttcttatttattttctgaccaatttgaatctgagtttaaaatattcttcaacagtcttaacataaaaaaattaaaacacgaatcaaaattttattatttatttattatttttgtggggggggggttcaagacagggtttctttgtgtagccctggctgtcctggaactcactcggtagaccaggctgtcctggaactcagaaatccgcctgcctctgcctcccaagtgctgggattaaaggcgtgtgccaccactacccagccatgaatcaaaattttatttttaattcctagttgaaccttctctctaaaaatgtatttatacaatacattctccatgtgatattttttcttttctttgtttttttttttttttttaagaattggggcctgttttaagagattctagacacatacacattgctattccatctggggaaatttactgattgtggcaatcaaatgaatacgtacctctgctttctcttcacgggcctcacttagagataaccttccaggttgtgcctcagagatgtcacgtgacccatttctgtatctttgtgcggtcccaccgggcctcacttgcaggtgcttcctgcttttatgagtaaagggttgttgtgagtctagtccacgggctggcaaagcagctttcttctctacttgtttctcccactcgggaagtccatacataatttaattacatgtttcttctgggaacaagaaagggagactacagagagtaaaagcacttttcttccatgaaaaaaatgtcctctttgggttaagcaagccacttaaggccggaaggaaggaacagatgttcagctaaagtggaagtgcagatccactgtgggaacttcagagtcacatgttggtttttctagatggaatctacgaggatggacttctcctggatcactccagtatttgttggcagagcagatgctataaatttgaatgggactttagtatccaaacaggattttaagcacagtactagtagaaaattgacatttggcctgtgaaattcagtgacagatgctcatattagagacagtcatggtgactgaccccagagcaggatgggggtgaggggaggggaggagaggaggacagtgaagccggtaacttgttatgcttatgttcaggagcaagctggacaagagaagagatgcctttttcttttcttcacaacgtaaaaagaaattctcaaatccaaataaaacgaccacaaaaccccaggttgctaaagcctccctgagggaaaagaaagcaagaggtcttatgtagcttactccacattgaacaaagctgtagagattgaagtagcatggccctgggtaaagcagagctttggagccgagtagaggctagtgtagacctagcatccatggcggtggtgagttgaggagggatggcctttacagtgctagtgctgggaaagttggatgtacacaaagacacagatgatgatactacaccctcacctctcaccagttcgaaaaaccaatcccaatacagggcctaaaccaaaatgttgagaagaaaacacagaaatattttaaggtattgaaatggctaagatttgggggggggggggcaggatagagtaacaagactctcaagcacaggaaaagaaagcaaaataaacacatgccatcaaactggaagcctgctactgaaccagagcaagtggggacgcgctccagagtgagagaatgtcacctgcaaattattcagttgaccaggggctaatagtcagaacctggaaggaactccaggagccaaacagacaaaaagctggggacaaaagcactacatagtcattttaaaaacatgcagatgaccacacgtgtgaaaaaatgctcagggtctttaatcatcagggaaatgtagtgaaactgcaaggtgtcacttcaccttattaagaatggcatcaccaggaagactaaaggcaggtcctggggacgacagataggaagtggcctttagactgttggttggaatgtaacgtaggatacttaagagaggtctttaaaaacgccaaagcaaaactattataggatacagataaactactattgggtatataaacaaaagagacaatttaaaaataaataaataaacatcttcactctcatgcttaattttacaactattcacacaagcccaggaatggtacattgtaagtaccctgacagatgtacaaagtgtggtggtgcgtacacacagtgggatatcattcaggtgtaaaaagaatgaaattgtcatttgtgacatgaatagaactaagatcacagtaagccaggcatagaagaaaggtgggtactatgtggagctcagacaggtagagtcttaaaacgtttgtcttgtgaaagttgaaaacatactggtactttaccacaggtttacgaggggggaagaatgagaaaccgcccgtcggtggacacttagggaaaagacatcagtgtagagcacttgtgtagcacacatgaggcgtggcttgctctccctgcctcaggagttgtagtgcacagctcacaataacagtatttcaaaacaaccaggaggattctcagtggaaagctatgacagatgttcaggagatggatgtgtagactctggcttgagctttacataatacacacatatattgaaatattacacaacacaaaaaatatagacgtaagcactaacatcagttaagattgatgcagaggttggaaagggcttggtaaggtaggaaggtgagaagaacacacagaagtaaacattcttagcaggtcctcagataaagcacacggcagctgactcttgggacacttttagacctgtaattgctgttctcttcactcacaaatgaaatcaattttgcagtcttggtttgttcatgtatgtgtgcgtgcatgcatgtgcgcgcgcttgcacgggcatgtgcgtgttgccttctggattgcagaaagtctgatttttcatactcaaagaagattctagaaaataacttttgaattatttctgttgaacatatgatttcattttatatttcaggtcaaatatcagttatagaaccacgtgtttcttttagttcccattaattgactaattctttgctgttttatgtctagctgtggagagaagtctttgcctacttcactagtcactgacttcaccttagggagaaatatgttgtttgaagaaagaagttttcattctttagtttcttgttctactttagacttaaacattttggggaaaaatacagtatgaattttatccatgataaaaaattcacatcctatctttttttgtttttgttttgtttttgttttgttttgttttgttttgtttgtttttttcgagacagggtttctctgtgtagccctggctgttctggaactcactctgtagaccaggctggcctcgaactcagaaatctgcctgcctctgcctcccgagtgctggggcgtgtgccaccacacccggctcattttctttttgcccatatggaaataactttgacattattattatatggtatactgattagaaaaaatggacaatgaagaaattatgttgtttgtttttaatgcccatgaagtccagtttgtgttgtttatatattcttggatatgtgcccttcattgacactatggttggttaccaagggctgtgctcgtgaagaaagctgactccttttctcagcagctattaattagcagtggtttctttggatgggggtgggggcatctctgcccccattgatgcccatctctgctctccatattgggatttggtatggcttgagcttacacaggtcttgtatatgtcacaatttctgtgagttgatatgtgaagctgacctgttgaatctggaagacaccatttccttagagccattccccacctttggctctttctttccacccctatcccacaatgaccgcaggccctttcgagaaggagctttgatatacctgtgtcatttggggctgagctttccagtctcctgctctcagcaccgtaatccattgtggatcctgtgttactcaccatcttcttcgaatagaagcttctctgaggagggttgagggatggcactaatctatcggtgtaagattccgtcattaggagtcagtttactagtttgcccatttagtaggataacagtagtaggttcccctctagaacctatggcttggctagtctcagttcttggtttcatgttgcagagtgggtcttaaatccacttagaaggtagttgtgttactcctgtgacagttgggccactctgttccagtgggcgtttcttgcccggccacctctcactgtggcttacacagtcacagctgggtaagattgatgcttgctgtttctcccctggagtgtgtgcggcacctcgagacactctggaagcttccgggtcagcaccagcttgatatttccatgttctattggctcaagttcaaagtgtcttcagcaagagggcttcactgtcaggctggagggtagccaagggcgctggcacagacccctaaatattgtaggctctttcagtgcacttggttaccctgtctctgatggaagcatgatggattcctcttgagtctagtagtagcttttggttaatgtattgaacgtctcttttttaaaaaagatttatttactttatgtacatgagtactctgtcttcatgcataccagaagagggcatcaaatcccattacagatggttgtgagccaccatgtggttgctgggaattgaactcaagacctctgaagagcagcctcttaaccgctgagtcatctctccagcccttgtacacttttttaaagtataaagcagttaaaggcaggaaaacttagaggtctggaaactatttgatttattttagtgcccatttttatcatttgggtattactgaagtattttcaatagttattagtcatgaaaaatttgggttttgggtttttttttcttcctaattgaactgtttctctgaagctacttggttgttattcattttttgctttaataacaggccagtgtctcagttttccttgtcgttgcagttttagtatcagagttaagatgcctccattaccgttctccacttagagcatgggcgttgccggttctccactctagactgctgcgtctggggtttggatggtgtcagtctttacagcttctgaccttcttctttgcaatgattgatcttaagtttgaaatttatctgcattggcatgtagcggattttttttcctttagtccgtgtctgtggcagtgagtttttttgttcctcgttttttttttcttacattttcttattctaactaatgtgttgctcatttttgttttatatctaaagagctgtctttatttttaaatgtttttttcctaatttctgcttttctcagtacgagcttctcttcatcagtgttactgataattgaggtcggctttcctgtttgagtatgtttctttcattaaaggcattgcagtgagaagtggaagcgcttcctccgtgttcagagttgcagcacagacactcgacaggcagttgcttcacttggaactaacgttcccttatgcgctgtgctgagcagttgccagccatacttcccttcctcctattgtggttataatgaaaggatactttgaaagaattagccatttgcagtgttttgttaaaagagaaatgtcgtatttagaattcttgtagcatcctggctggtgtcttaccaccttaatttgtggtaacatcaccatgtttgtccagaggtcggtcgtctttccttccttctccttctttccttctttcattccttctttccttccttaaaaataaatataacttttctttgtttttatttcatgtgcatttgtattttgcctacacatgtctgtgtgagggtatcggatcccctggaattggagttacacagacagttgtgagctgccacatgggtgctaggaactgaacacaggtcctctgaaagagcacacagtgctcttaaaccactgagctatctttctagccccaaggtcatactttttatgcaagaatattaatagttcccactaaaataagtggcggatagattttaattttgataacattttaggacattaaatttgaaaatataaaaataaactatatttaatcaccattgaactattgatcagccaacatatttctatttatagaaaaatatgaaagtgtattcattttgtgttaatatcatatgttttcatttaaaaatttgttgcttaatactaaatgtaagcatgtctttccttgtaggtataaacgagtcttttcagttggaacccatgcagttactacctataatcccaataccttagaagtaacaaatcaggtaattttaatagaagttgttgagggtttatgtgaacctttaaaagtcaagattgcagcccatcttccctgctgaagtcagcagttcagaagagaaatgtcagcctgaagatgaatgtgtatatatgatgccttgtgttcagacctagaagtgaagaagttgtgtgtgtgagagcgagcgcgggcacatgctttctagactctcgaggggatgactttcacatgttactgtttttagccatctctataaaattcgtccctttctaaagttgttactattaatcaagcatattagttatgtcacaagtgttattgttcacagactttccaaagaactagaattacttgtttgtaaaggcaagactaattgaacatgaataaataaacatgcttaaatatagttgttttaaattctaaactaggcatgttttgtagattgtctttcttaatgagtacaatcatgaaatgttagtccctaattcttttcacttacttaagttgctttatattatcaataccatcatagtatagatctttttgttattgtttctgataattaaaaacctttaagagaacttgaattgtagacttgctagaggcacttctccccacccctcaagctgcagtgtctgtaaactgttgttcctttaagcagagaatatggaatgcaggagatgaaaaccaacggtgtaccttattacttcagagcaaaagttaaaggcttccttctttttgccagtggccttatggagacatttgtagcatcagccctgttgggaaaggacaaggaacagagttcaacctcacatttcgtaaaggcagtgggaagaagtcagaaacgttgaagttttctacagagcacagaacagagctgcttacggaggctttggtgagaagacccttgccacaaacttgctctctcttctgaaagtgcagtggcttcctaagtctcgagacggagttccaccgctctgcccactcctgctttatactgacctttaacttgacactgaaaccttttctttcccataaaaaagtcaacccggaaatcctttgtatttcagtgtattactcttttcaagtgtatatgcaggatgaagcattgtctgcttagtctgttttgttcatcagtaaagtctcacagtctttactaaatgtcgtcaaactgtagactccataactgttatatcatagtcactgagttgtggctttgcctggtctgggtgggaaaggctggctcaggcgccttccttacagtctgtcctcacaaacttgtgttttctttcagagatttagaactgactttgcagagggaaaaatcacaggaagggtaagagttggcatttattggtgtgcattcttatgtgagtaaatgttgccttcattgtagaaatcattccatagcctgtgtgttcctgttacagtaaactaaaggaaacacagccttaaagcctctcaacaggagaaggacatgagtgagctttaacaggaaccatcaaatcgagaaacagatttcagagtgcttttgtcagataaaaacccagagcattaaaaatggtataagggctagagagctagctcagcagttgagaacacccgttgttcttgcagaggactggggtttggttcctagctcctgcatagcaacgtacaaccatccaaagggttccaggttccaagggatcaaataagccacgtctgacctgcactggtacaaggcacacaggctcggatgctggcacggtgctcacacatgcaaataaataaacctacaagcagggcagccattcaggtgcttcttagagtcctcagcacacagtggcagtgctgaaagccgtgtagcagtttgctttgtggagggtttgaggtttgggaggttggtgctatttttctgcatgctcccgctttgggtctggcttgtatgaaagcccagcgtgatactagcagctttgagaaaaaccatattgcttagtgcagtcctgactttcccagccaggcctctccattaaaccagagacttccagggagcggggatggaggacttttgggttttctcatgatgcatcccatttctcaaccgtgcatgggctttaccattatttatgcttcctttcctggcattggagattaaacctaaggccttctccaccactgagtccagctgcagtcctcaggttttaacgtttgaaactgagacaaggtctaattaagatgttcacagacggccttgaacttcctcagtagcccaggcagaggatctcccaggtaatggggatcacagacctgcaccacagcatggctctttctccttctataatggggagaagaaagccttctaccatcactggtcgaaaccattgtctcttgctaaagttttaggaagtggactctgatatgctgataggcataggcataatttgacaggccctctcctgtcaaagtcttgcctccatatgggcatttttctgctgggtttatgcttccaaagctttgctcgttttaatgctagcccttggctggttgcccaggagccatttcagctcgttccatgtcagctgacaagctgctggctcattgtcgctgaggagcgtctgtggggtttctgtaaatcccatcttggtgtgcctatggtcattatctcaggggagttttccatgtctctgtttagatgacaacagcttccaaagctcagcactttcatctgttagctcccttttgtggtggctgaggtagaactaagtattacctctgtatgacacctgcctctccagaatacggcagggcctccgcctcagaggctggactcagcagctccattacctgagttgaatttggtcctgagtcctgatagctgtcacctgtgatatactccagatcatggtctttcaacctcccttaggcttggcctcaacaatagttcttagagataatgatacatttccgtcagcagatattatccgctgagagaaatggagactgtcctgtagagtgagtttggatgttttggcaagcctaattgaaaagcaccattgtgctggaaagatggctgagtggatagaagtacttgctgtgcgagccctaggacctgaattcagaaccttctctcccaccaatacctgagaagccaagccaggcgtgtgctcagaaccccagactaggggtagacaggggctgcttggaggtttctggccagccagggtagtcagtcaggaagctccaggctcagggagagaccccgtcacaattaggtagaggagaaaaaggtggccaatgttgatctcttgcctccacatgcatatacacaggcacaggcacatgaagccatcaagcatatgaatgcagacacacaagatggtgttctcttattgcccttcctgctggagaggtatggtgttggtctgccctctgtcacccatcaccagggccctgattgtctccttgagtgatgtagacacttttatctttctacagagttctttctatgaaactatggaacagtgctgaggccatgggtgtgagctgggcctgtgaatgttgttgttgagttgttagatgtgaggggagtgttcatgatggtagtgccctatttcttgctgaacacctataagacaatttctcttggtgtcaaaaaatagtgtttgtgagccaccaaccagctcatttttactttcagaatggtgcagtgcattcttcgtacagggtagggaactctggtgtcagaatgtagaagaggatattcattttacagcttgcatgttgttttcctttctctgtctcccacttcatctcatttacatttgtttccttctgtgccacgtcattttccttagtaaccttcattaaatcttttctgaaaaaatgagactagaagtgggggaaggagaaccacaaagatggtgttgaaacatgtctaagcacattacattgcatgctgattaaataattgaaacataaaaagagaaaactgaggagtgagaggatatcggtcatgctgctcatgtgatgtccagctagtctgatttgcaaaggagtctccccagggcgctgtgcttgccagtgcagtgcggtcagcactcaaagataacctttcagttaggattgagaaatcataccgctggtaaaattttggcttcagaaattttgggggtatagataaattgtatgttaatgtactgggccgtctctatttaatgtttccttttggggcggggctgtatattatgtgtgattttagggcctccttttgattgtggggttttatgctatatatggtttattggctgctttatattttgtttgtttgtttgttttgtatttttctgctatttgatttttaaaacttcctctggctctgttacttctgttgccctggaactcctgggcccaagcaatcctcctgcctcatcccctgagtgtctggcaccatgggcacatgcttttgccagctgaatttcctcgtttcctctttccacttagagggtagtttaaaattctttcacaacacattgtaaacttaggtctgtgctaattaagaaagaatatggtgtcctcagttagtatgaacattcttaatgaaatcaacaaccctacactcttcccttgtctagaagctgttaaaactttcagggtttagattgttggtcctttcagcagtgattacatagtcaatgtaactttgttttgtagcaggcttagatttgaacctgaaggtaatgttgtgcttctctctagagatataactgctacaagcatcactggagcgatgcaaagaaacctgtggttttggaagtaactcctggaggctttgaccaaataaatcctgtaaccaacagagtgctgtgttcctatgactacaggaatattgaaggcttcgtagatctctctgattatcagggaggattttgtatactctatggaggatttagtagattggtaagtagtttttgtgaaaagacatttttcaaagggatataactgaagtctgggaagatggcttagccagtgaagaacctgaggacctgagatagatctccagagaacagtttaaaaatagtagctgggtgtggtggtacatctgtcccagcactggagacagacaggctggggcttaagaagtggtctgtgcttgaagagcagcacgtgaggttgtctctggcctccacatgaacttggctacacatgactgtagaacagtttgaagaagttctgttttcactcgactgtatgggtgtcttctgggaggaagtatggtattaagagtctggcaggctgtggtgtcacagatatctaaggttagtccctttgctgtctctaaaatgagaatactatgcacattatgtggagtacatatgtgcgcgcgtgcacatgtacctgcctgatgacttgggggaggtgatttatctaagatgctccacaccgaacactactgagtatcgttccatgaatggggctgtagtttctaccagcatcgtgtcatacctgaaagtttctaagctttctttgaaaaatgtaatttagaagtcttagttctagggactgtcctctgttgtgctgtttatactatgaaatgtgagtgtgcattgacacttcaggtctggagccggcagcatggttttgttttgtaattttgagttaataagcaaaggggagacagcagaccctgtgtaagatgctgaaatcctgtttattgcacagtgatgtggataggatcatctttgtagagtctcctcccttgataaaggttaagctggcagcctcccatgtaagcacgcacacgtgtccataatcatcggaaaggccagcctacagccttagctcctgtagccatctcagtgtctaggaagcatgttcccaaagtttagtgttctgtggatgcaataccccaagggagcagagcagagcaaagcaggtacagatcacctagatgcatgagatgctagatggtggccaaaggagagcaaacacagcgatgggcatgcagacaatctgatttataacatgcagtttgctctcagccctttcggccttaggctttctgtgttgatggatacaatcctggtttccctcatctggaacacacagggtgaatattttcttacatctgagtgtagacacaaaacatgaaaatccaaagaaaaaagcttgctttcccccattttaaagtaacttaaggtctcctgtccaaatgctgcctcctccctggactgcagaccttcactgtgattgacctcttgatgggaagtgtgcctaattcagccacgtgaccgcctgtcacagttacccagccaggctgtatggtggagcaatatctgttaggacattccttttttgccagcacgttttattgcttaatgataggaagaagagttcatgtagattatctcctaagtacagttaactcaatatccatggtttctctatccactcatcagctagggatcagaatattaaggaaaagtttgtacctgcactaaacattggtagaacttttcagtggccattccctaaacaatacagtatactaatgtagtgtaacacttgtacttagtattgtaaggattcagaggtggtttaaagtgtacaaagaacatgtagataccacttcagggacttgagcatctgcagatatagaggtcctggactcacacctcatatactgagggggagcactgaattgttctatagttttgtaaaagctactaaccaaaatgaaacattcactccaaatataatatcataacagatttagttagccaatctttaattcctttgtgtctatggtgactgctcagttggtaggattagaccagggtttctcagcaaaaagagctgtataactttcttttctggccaaaataaaaatcttagttggtcatttccaccctgcccctttcaatgtaaataatgcaattccggtctccaggcacccagtgcagatctttttccttagctgtgtagcacagcattgactgttggtcaatgtaggcagcagtgcctaatgagtatacatattcacatattctttaacatatttttgcaagaaaaccattgtctaaaatagttcaacgcagagctgccttgattgaaatgaaatgctaccccacaatgcccacccgccttcataggcttggggttcttctttagaaggtggcatgctgtttggtacgagtggtaattgataaccagactctgggaagttacgggataatgcctgctggctgagttggcttatggcttcctattgcaaactattgtgttctttaaatttagtatttgccttttaactacaatatactgtttgtttccccagtatattctgttgcctttattcttaaaattgttatattaatcttgttcatatgtgttaagtaaatatggtcatgttttagttgtttgattcctgacatagaaatttaaaaatctgtgcagcatttattttcgtcagagcaaagagaagagatcattaaaagtgcaatagaacacgctggcaactacataggtatctccctgcggatcaggaaagagccactggaatttgagcaatatttgaatcttcgttttgggaaatacagcactgatgaatctatcacatctttggcagagtttgtggtccaaaaaatatctcctcgacattcggtaagagatgtgtgttgagtataaaaaatcgttctaatgttttggcagctttctttaataacttttaaacacattttcattttactgtttgaaggaacctgtgaaaagagttctggcggtcacagaaacatgcttagtggagcgagatccagcaacctacaacattgcaacattgaagcccctgggagaagtgagtaagcccactccgcttaagtagccagcttcctattgataaacttgaattcctattttaatatttactggtttctaaggaatgcaaaacaggctggcatggtaactcacactggtgagcttagcacttgagggggctgatgccggggatcaggagttctaagccatcttcatatcaagtccaaggctagcctggtctacatgaaaccctgtctgaaaaatcagctacaacagcaaaagtggatgagaaacaggcatgatctgtgtttaattattaatcttttatttactagttttaagatgatggcaactataaacattacctttctaatatacaaagaatggaatatttatttccatagttgcatatgaaacttttaaatgattcttaaattttgatattataagcaggttacattttgtgagtaatgactttacaagaaaaaaaaatgatatttggtttttacaatgaaatactataaagctaaacatttagggggttgggtaaactttttatttggattttgtttttcttaggtatttgcattggtttgtgactcagaaaacccacaactttttaccattgagtttataaaagggcaagttcggaaatactcttcaacagaaaggtagggttaggttacctgtgtgtgtgtgtctttttattttataattttgagatcataggatgtgcagagcaaataaattggtcaatgaaggataaaatcaaagataatctggagctttgaaagtatttaatttgggagaagacattgctgcatattttaaatgaccccagttaacctggtgtgtgttcatatgcacatccagaaacagatgtaatccagatgaggcttgtctcgtcggtgattctggtattggcaaggtgaccatcttagcagaaacacttatagtcatggtaacacttcagaattgacaaaacctaggaagattgcatatatcatgagtttgagtgggcgcccataatgtcatgtttccacacagtgtgtggctctgcagcagtgcagaccctgggcactaatacatatagcatcatgggtgaaccatgaagcatcgtgggtgaaccatgaaagcagataatgaacaagacgtgatactacatgctctatggttctgctctttggacgttttaaaacaaaatcaaaagtagatgtgttacatcagcgattgggtgtttccaaatagatccagaggcactttttgtggtggtcagaatatgtataagctggattatgatgattgtccaactgttttaatttatacaaaactgtgaaagattttactggagtgtgttttgtgatttgtaatttaggcccaaggaaagctactaaagatagataacctgtagaccagctaaaccaagaagcacagaagccatagtttatgttcctcacagcaagtcatacagcagtagcagggcagagggccgctctgagcctggaacttaaccccactgaaaccctggaccccaagaaatcccctagcacattacctgcagaaaggcctgtgctgcactctagatccaaggtctctttaaataccaaacctaaaactttatacttttggctttgcttagagattccttgttagcaagcttgctggatggagtaagagcctctggtaacagagatgtttgtgttaagatggcaccgacccacaaaggccagcgatgggggttactcagcatgcctatagacgaggaagtcgagagccttcacctcagattcctggctgcacctcctagtaagtacttgctttaatataattgtatttccacacacccaacaagacagtagtttaaaaactgggaatacaaagctttaaatctccccctcgaaccttctcatctctttgcagatggcaactttgcagatgctgtattcaggttcaacgctaacatttcctacagtggagtgctgcatgcagtaacacaggatgtaagataagttgtgttgtcctctgctcattgtcactagcttttgctatggaaccgtacctcaaataattactctttgtttaccctagggtctcttctcagaaaacaaggaaaagctaatcaataatgcaataacagcactgttgtctcaagagggggatgttgtagcctcaaatgcagaacttgagagccagttccaagctgtgaggaggcttgtagcctccaaagctggtttcctggccttcactcagcttccaaagtaagttagccttggtagagggcttgctgccgcatgtccagggctctgggtttaatctccatgactattaaaaaaaaaaaatgcatgttgcttttagaacctagctttatgtaaagattttgaacaacttaaaaatagaaaatactgatcttggtccgagacccgccgaacttaggaaattagtctgaacaggtgagagggtgcgccagagaacctgacagcttctggaacaggcagaagcacagaggcgctgaggcagcaccctgtgtgggccggggacagccggccaccttccggaccggaggacaggtgcccacccggctggggaggcgacctaagccacagcagcagcggtcgccatcttggtcccgggactccaaggaacttaggaatttagtctgcttaggtgagagtctgtaccacctgggaactgccaaagcaacacagtgtctgagaaaggtcctgttttgggccttcttcttcggccaggaggaggtccaaatacaagatatctgcgcaccttccctgtaagagagcttgccagcagagagtgctctgagcactgaaactcagaggagagaatctgtctcccaggtctgctgatagacggtaacagaatcaccagaagaacaatctctaaacagagtcaactataactactaactccagagattaccagatggcgaaaggtaaacggaggaatcttactaacaggaaccaagaccactcaccatcaccagaacccagcacacccacttcgnnnnnnnnnnnnnnnnnnnnnnnnnnnnnnnnnnnnnnnnnnnnnnnnnnnnnnnnnnnnnnnnnnnnnnnnnnnnnnnnnnnnnnnnnnnnnnnnnnnnnnnnnnnnnnnnnnnnnnnnnnnnnnnnnnnnnnnnnnnnnnnnnnnnnnnnnnnnnnnnnnnnnnnnnnnnnnnnnnnnnnnnnnnnnnnnnnnnnnnnnnnnnnnnnnnnnnnnnnnnnnnnnnnnnnnnnnnnnnnnnnnnnnnnnnnnnnnnnnnnnnnnnnnnnnnnnnnnnnnnnnnnnnnnnnnnnnnnnnnnnnnnnnnnnnnnnnnnnnnnnnnnnnnnnnnnnnnnnnnnnnnnnnnnnnnnnnnnnnnnnnnnnnnnnnnnnnnnnnnnnnnnnnnnnnnnnnnnnnnnnnnnnnnnnnnnnnnnnnnnnnnnnnnnnnnnnnnnnnnnnnnnnnnnnnnnnnnnnnnnnnnnnnnnnnnnnnnnnnnnnnnnnnnnnnnnnnnnnnnnnnnnnnnnnnnnnnnnnnnnnnnnnnnnnnnnnnnnnnnnnnnnnnnnnnnnnnnnnnnnnnnnnnnnnnnnnnnnnnnnnnnnnnnnnnnnnnnnnnnnnnnnnnnnnnnnnnnnnnnnnnnnnnnnnnnnnnnnnnnnnnnnnnnnnnnnnnnnnnnnnnnnnnnnnnnnnnnnnnnnnnnnnnnnnnnnnnnnnnnnnnnnnnnnnnnnnnnnnnnnnnnnnnnnnnnnnnnnnnnnnnnnnnnnnnnnnnnnnnnnnnnnnnnnnnnnnnnnnnnnnnnnnnnnnnnnnnnnnnnnnnnnnnnnnnnnnnnnnnnnnnnnnnnnnnnnnnnnnnnnnnnnnnnnnnnnnnnnnnnnnnnnnnnnnnnnnnnnnnnnnnnnnnnnnnnnnnnnnnnnnnnnnnnnnnnnnnnnnnnnnnnnnnnnnnnnnnnnnnnnnnnnnnnnnnnnnnnnnnnnnnnnnnnnnnnnnnnnnnnnnnnnnnnnnnnnnnnnnnnnnnnnnnnnnnnnnnnnnnnnnnnnnnnnnnnnnnnnnnnnnnnnnnnnnnnnnnnnnnnnnnnnnnnnnnnnnnnnnnnnnnnnnnnnnnnnnnnnnnnnnnnnnnnnnnnnnnnnnnnnnnnnnnnnnnnnnnnnnnnnnnnnnnnnnnnnnnnnnnnnnnnnnnnnnnnnnnnnnnnnnnnnnnnnnnnnnnnnnnnnnnnnnnnnnnnnnnnnnnnnnnnnnnnnnnnnnnnnnnnnnnnnnnnnnnnnnnnnnnnnnnnnnnnnnnnnnnnnnnnnnnnnnnnnnnnnnnnnnnnnnnnnnnnnnnnnnnnnnnnnnnnnnnnnnnnnnnnnnnnnnnnnnnnnnnnnnnnnnnnnnnnnnnnnnnnnnnnnnnnnnnnnnnnnnnnnnnnnnnnnnnnnnnnnnnnnnnnnnnnnnnnnnnnnnnnnnnnnnnnnnnnnnnnnnnnnnnnnnnnnnnnnnnnnnnnnnnnnnnnnnnnnnnnnnnnnnnnnnnnnnnnnnnnnnnnnnnnnnnnnnnnnnnnnnnnnnnnnnnnnnnnnnnnnnnnnnnnnnnnnnnnnnnnnnnnnnnnnnnnnnnnnnnnnnnnnnnnnnnnnnnnnnnnnnnnnnnnnnnnnnnnnnnnnnnnnnnnnnnnnnnnnnnnnnnnnnnnnnnnnnnnnnnnnnnnnnnnnnnnnnnnnnnnnnnnnnnnnnnnnnnnnnnnnnnnnnnnnnnnnnnnnnnnnnnnnnnnnnnnnnnnnnnnnnnnnnnnnnnnnnnnnnnnnnnnnnnnnnnnnnnnnnnnnnnnnnnnnnnnnnnnnnnnnnnnnnnnnnnnnnnnnnnnnnnnnnnnnnnnnnnnnnnnnnnnnnnnnnnnnnnnnnnnnnnnnnnnnnnnnnnnnnnnnnnnnnnnnnnnnnnnnnnnnnnnnnnnnnnnnnnnnnnnnnnnnnnnnnnnnnnnnnnnnnnnnnnnnnnnnnnnnnnnnnnnnnnnnnnnnnnnnnnnnnnnnnnnnnnnnnnnnnnnnnnnnnnnnnnnnnnnnnnnnnnnnnnnnnnnnnnnnnnnnnnnnnnnnnnnnnnnnnnnnnnnnnnnnnnnnnnnnnnnnnnnnnnnnnnnnnnnnnnnnnnnnnnnnnnnnnnnnnnnnnnnnnnnnnnnnnnnnnnnnnnnnnnnnnnnnnnnnnnnnnnnnnnnnnnnnnnnnnnnnnnnnnnnnnnnnnnnnnnnnnnnnnnnnnnnnnnnnnnnnnnnnnnnnnnnnnnnnnnnnnnnnnnnnnnnnnnnnnnnnnnnnnnnnnnnnnnnnnnnnnnnnnnnnnnnnnnnnnnnnnnnnnnnnnnnnnnnnnnnnnnnnnnnnnnnnnnnnnnnnnnnnnnnnnnnnnnnnnnnnnnnnnnnnnnnnnnnnnnnnnnnnnnnnnnnnnnnnnnnnnnnnnnnnnnnnnnnnnnnnnnnnnnnnnnnnnnnnnnnnnnnnnnnnnnnnnnnnnnnnnnnnnnnnnnnnnnnnnnnnnnnnnnnnnnnnnnnnnnnnnnnnnnnnnnnnnnnnnnnnnnnnnnnnnnnnnnnnnnnnnnnnnnnnnnnnnnnnnnnnnnnnnnnnnnnnnnnnnnnnnnnnnnnnnnnnnnnnnnnnnnnnnnnnnnnnnnnnnnnnnnnnnnnnnnnnnnnnnnnnnnnnnnnnnnnnnnnnnnnnnnnnnnnnnnnnnnnnnnnnnnnnnnnnnnnnnnnnnnnnnnnnnnnnnnnnnnnnnnnnnnnnnnnnnnnnnnnnnnnnnnnnnnnnnnnnnnnnnnnnnnnnnnnnnnnnnnnnnnnnnnnnnnnnnnnnnnnnnnnnnnnnnnnnnnnnnnnnnnnnnnnnnnnnnnnnnnnnnnnnnnnnnnnnnnnnnnnnnnnnnnnnnnnnnnnnnnnnnnnnnnnnnnnnnnnnnnnnnnnnnnnnnnnnnnnnnnnnnnnnnnnnnnnnnnnnnnnnnnnnnnnnnnnnnnnnnnnnnnnnnnnnnnnnnnnnnnnnnnnnnnnnnnnnnnnnnnnnnnnnnnnnnnnnnnnnnnnnnnnnnnnnnnnnnnnnnnnnnnnnnnnnnnnnnnnnnnnnnnnnnnnnnnnnnnnnnnnnnnnnnnnnnnnnnnnnnnnnnnnnnnnnnnnnnnnnnnnnnnnnnnnnnnnnnnnnnnnnnnnnnnnnnnnnnnnnnnnnnnnnnnnnnnnnnnnnnnnnnnnnnnnnnnnnnnnnnnnnnnnnnnnnnnnnnnnnnnnnnnnnnnnnnnnnnnnnnnnnnnnnnnnnnnnnnnnnnnnnnnnnnnnnnnnnnnnnnnnnnnnnnnnnnnnnnnnnnnnnnnnnnnnnnnnnnnnnnnnnnnnnnnnnnnnnnnnnnnnnnnnnnnnnnnnnnnnnnnnnnnnnnnnnnnnnnnnnnnnnnnnnnnnnnnnnnnnnnnnnnnnnnnnnnnnnnnnnnnnnnnnnnnnnnnnnnnnnnnnnnnnnnnnnnnnnnnnnnnnnnnnnnnnnnnnnnnnnnnnnnnnnnnnnnnnnnnnnnnnnnnnnnnnnnnnnnnnnnnnnnnnnnnnnnnnnnnnnnnnnnnnnnnnnnnnnnnnnnnnnnnnnnnnnnnnnnnnnnnnnnnnnnnnnnnnnnnnnnnnnnnnnnnnnnnnnnnnnnnnnnnnnnnnnnnnnnnnnnnnnnnnnnnnnnnnnnnnnnnnnnnnnnnnnnnnnnnnnnnnnnnnnnnnnnnnnnnnnnnnnnnnnnnnnnnnnnnnnnnnnnnnnnnnnnnnnnnnnnnnnnnnnnnnnnnnnnnnnnnnnnnnnnnnnnnnnnnnnnnnnnnnnnnnnnnnnnnnnnnnnnnnnnnnnnnnnnnnnnnnnnnnnnnnnnnnnnnnnnnnnnnnnnnnnnnnnnnnnnnnnnnnnnnnnnnnnnnnnnnnnnnnnnnnnnnnnnnnnnnnnnnnnnnnnnnnnnnnnnnnnnnnnnnnnnnnnnnnnnnnnnnnnnnnnnnnnnnnnnnnnnnnnnnnnnnnnnnnnnnnnnnnnnnnnnnnnnnnnnnnnnnnnnnnnnnnnnnnnnnnnnnnnnnnnnnnnnnnnnnnnnnnnnnnnnnnnnnnnnnnnnnnnnnnnnnnnnnnnnnnnnnnnnnnnnnnnnnnnnnnnnnnnnnnnnnnnnnnnnnnnnnnnnnnnnnnnnnnnnnnnnnnnnnnnnnnnnnnnnnnnnnnnnnnnnnnnnnnnnnnnnnnnnnnnnnnnnnnnnnnnnnnnnnnnnnnnnnnnnnnnnnnnnnnnnnnnnnnnnnnnnnnnnnnnnnnnnnnnnnnnnnnnnnnnnnnnnnnnnnnnnnnnnnnnnnnnnnnnnnnnnnnnnnnnnnnnnnnnnnnnnnnnnnnnnnnnnnnnnnnnnnnnnnnnnnnnnnnnnnnnnnnnnnnnnnnnnnnnnnnnnnnnnnnnnnnnnnnnnnnnnnnnnnnnnnnnnnnnnnnnnnnnnnnnnnnnnnnnnnnnnnnnnnnnnnnnnnnnnnnnnnnnnnnnnnnnnnnnnnnnnnnnnnnnnnnnnnnnnnnnnnnnnnnnnnnnnnnnnnnnnnnnnnnnnnnnnnnnnnnnnnnnnnnnnnnnnnnnnnnnnnnnnnnnnnnnnnnnnnnnnnnnnnnnnnnnnnnnnnnnnnnnnnnnnnnnnnnnnnnnnnnnnnnnnnnnnnnnnnnnnnnnnnnnnnnnnnnnnnnnnnnnnnnnnnnnnnnnnnnnnnnnnnnnnnnnnnnnnnnnnnnnnnnnnnnnnnnnnnnnnnnnnnnnnnnnnnnnnnnnnnnnnnnnnnnnnnnnnnnnnnnnnnnnnnnnnnnnnnnnnnnnnnnnnnnnnnnnnnnnnnnnnnnnnnnnnntgccccggtacaggggaacgccagggccaaagggggggagtgggtgggtaagggagtgggggtgggtgggtaagggggacttttggtatagcattggaaatgtaaatgagctaaatacctaataaaaaatggaaaaaaaaaattaataaaaaaaaaaaaaaaaaaatagaaaatactgccgggcaatggtggtgcacgcctttaataccagcacttgggaggcagaagcaggcagattgctgagttcgaggccagcctggtctacaaagtgagttccaggacagccagggctacacagagaaaccctgtctcgaaaaaaaaaaaaacaaacaaacaaacaaacaaaaaaaaactgaataatttatttcttttatgtgggataaatctcttctatgtgatggtttagtagtttttatccttgagcagtaaaaaaggaagttagattgggctgatgtgggatattggctctgtaatcactggtaatatactgacttctgtgttcatggattcaattaattatttgtgctttcattaacactaaaaaggtttcctggtaaagcagataaggttaggaaagtgcattccagaggtgggattttgagcatgtaactgataccatgccactgtggaaacttaagatgacctgtacttttaataaaaaagtatgacattctgtcctgtacttggtgtttgttgtgaaaggtttcgggagcgcctaggaatgaaggtagtgaaagcactcaagagaagcaacaacggagtcatccatgcggctgtggatatgctctgtgccctcatgtgtgtgagtactcttcttaggtggactgcaggctttccttcccaggaatccatagttgtgcatttcctaaattgttctcatggccatttgtttcttcagttagcacatcctgtgtactaactggtgttttgtgtgcagttccttccatccaaactgttggcaggtagtctcacatgtgagtgtgaggcggagcccatggcacccctgaggctctgcacttagtctcggtgtgtgcatttcaaaccttgagcagggatctttcagttctggataggctttgcctagcatggaagatggcatgtccaaaaacatgcatgataagcaggcagtgattgtaggtgtgtgggatggcaagggtgggtaattgggacgtgaagctagaggcatatgcagaaatggtcacgtaaagcctccgtcagaacaaagactgggcttgtcctttttatgacattaactgaaagatttttcgacaagggagcagtcacatgactagatttcacttttagaaaacccactctggtagaacatggaggggagagaacagttggagcctgtagacccatttgccatgcagagaaagagatggggagctggggtactgactggctgaggaagtggcacatgaaagctgagtgacacagtgtggagggagtgacagctattcagcacttccaagtccctcatttatctcagggtttcgtgtactatctgggattgttctgtatgtaaagctttataggcagtcttagtgatggaggacaaacatacataatcccatgtgtagcaccttgtatacattccccaaaaagaattaaagtttattatctcaactattccaaataattctgttaaagaattaaactagagcataaattttgtgaaacaactgagtttacgcgttgactatgtacaggacaggctacagttagttccagcaggcgggttttacaggaacacattgactctcaggtaacacctgcttccctctgctcaggttaggatctgagctcggctctgaccaccatgcaggcatccacagtcaaaggacagttgctttgagggggaaaaagggtatttgccgctttgccaattttagcacttgcttttaaattctaagtttcaccatttcaaatttaaatgataaaggccttgggatgaggaattgttttccttttggtgagaaggcctgtggcagagagagagagagagagagagagagagagagagagagagagagagagagagagaactctgacgagacacgagaatctgtcacctgtgtctgctgctcgtcacaaggcttccttccaccgtggattcaaaagctgtggtttctagccacttccatgtggagcagatgtgtctgtgactgccttctctgtgacacaggacacgccttacgaatttccctcttcaatccacagcctatgcatgatgactatgacctaagacaagagcagctaaacaaagcttctcttctctcttcaaagaagtttctggaaaacttattggagaaatttaattcccatgtggtaggttgtaattaatgttttcttcatgggagatgtcatacagagatttcctagaagtgtggtataaacttgtttttgtcacagtgcctgaccctcaaatggttacagttcatctttgtcactagtaacaaaatactcttgaactttattaactattatagtaattggagattgctaataatattagctaaggaaatgtaccagaagtgccttcagacttttataaggatattgcaggtgtgtgtgtgtttgtttgtttgtttttcctaagacagggtttctctgtgtagccctggctgtcctggaactcactctgtagaccaggctggcctcgaactcagaaatccgcctgcctctgcctcctaagtactgggatcaaaggcgtgcatcaccactgcccagccaatattttagatttttttctttaaaaaaaaagtgttgtgaaataaattgttctaagaatcagtctcaccataactgactaccagtccctcaggcattgaacttcttagaagatagaaattttgtaaacacaatcaaattgccacagttttacacatattgttagattgcttcttttttttccccatttttattaaatgtgttttgggtgttttgcctgcctgtatgtctgagccacatgggtgcagtgtcagtggaggccaaaagaggtcagcagatcccctgcaactggaataatgaagttttgagcttacccatcatgtgggtgctggggatcaaacccgggatggctggaagcacagcaaatgtccttaactgctgagccagctctgcggtcctgtgattgattgattcatccctctcctcccctccctctccctttctgtctgtctgtctgtctgtctctttcttctaccctccctaccttcctccccctcagttgcacattaactttagttagaatgcacatttgaaaaatttgggttattctcttgaggttttaattatgctaaataattaatcttgaattttaattatgttctttagaaaataaacagtgggttactatattaactaataaataagtactcaagcatcatgaacatttgaaaaattcaagtcattgtttctgtctgacacccagaatgaagaaaggagcgtgcagttgctgtgttgggcgctgaaactcctgtgtccgtttctgaacagtgtgctgctttctttcaggatcatgggaccggtgccctagtaattagttcactcttggacttccttacctttgccctctgtgctccatatagtgagacaactgaagggcagcagtttgatatgctcttagagatggtagcctccaatggaagaaccctttttaaactctttcaggtgagcttgcatgtccctgtctaatggctgcactgtctgaaagacgcccttaagaattgttgcttccctacccttcaggatcggtaattctgggccttgcctgtgctccaggcaagcactgtgctactgagctccatccacagctggatccgtgtattaaattgtgtgagcacatgtgtatgtatatacgtgcatgcttccatgtgacagcagaaccttgaacatgaccatgtcagatttttaacccacaggtttcttggtgttttatgtagaactctgatgctattggcaattgttgtgtatactttgctagcttagatgtagtgaaatgcttgctttttgccttggtaggcttaaagttcactttctttacaattgtctacataatcaaggtgagtttttgccaggttgttcataagcactggaaaacattgttattttatatggtactgcagtgcttattgtattcatatacatgtatacatattttaaatatttatgattttagtgctactaattatattataataatgttattcatgttagtgttgcctatttgctaagctgtcatgaacttgacaggcttaaaactaaattccgagatggatcttttcctgattctgttttcctagttagttgttttccttaactttgtggcttatcaccttgcacagtgtttgttccttacgtggaacacctaaacatgtcagagtaaaattctcttttattcattgatctttcccccttcatttttaaagcatccttccatggcgattgtgaagggagctggattggttatgaaggcaataatagaggtgagagaatcattttgaaatcttaaagtttctggaatgttgattgattcttttcattgaagttgacatcactgccattcagtctttgaggggaaacttcttattctctggttcataatagttttagatttttattcagaatttgagggcagaggtcaccctgagaacgaacgtacactgtcatctccagatactgcactcacaccttgtttatttgttgtgacataaagtcagctttttattcctgtcgctttccttgatgttgggcattgggggcactgagctcgaggtactgaggctatgcagggatctgctatggaagagttaacgggagaacgaccacagaagtccctccctctgctggagtcgctgccgtacggtgctgcctctgcaggctcagtgctttagccttctgttctttagaagataaaaccctgggctgaagagacgcccagggcttgagatcactgattcttctcacagaggagatgggtcaagtcccagcacagaagtggtggctcagagcagtgttcagttcagttcctagggatctgttgccctctgtcgtacaaatgtgtgctgtacagatagatatgcaagcaaaacactcatacacataaaataaagttaaatctttaaaaaaaatttgaaagacaaaatcatagttattaaagagtagctgcattctgtgatgtttatagtgacatcaatctaaatggcttttgaatgcctgtatttttatgtaatactagaaatttggataaaatgtaagaggttctcttcttcaaaaaacatagctgttgtgatacgcatagaacatcttgataaaacagaattagtttgcccttaagtattttgtaggcaaactaaagacagacagaaaggtgtagatgtcagactgggcagagggtgggcgtttgcttggtctctcgttcgtgtttagtgtacatcactgcagacgtctcgtgctccctctccagctgacaggtgcttgcagttttaggttcgtctgtggcttctgcagagcttctggcatccagccacagttaggaccctgaagtgtcctctcagctgttctcccagcattctgccactgcagttctaaagcccgtcacccttcagaagcaaggcgctgactttgcttgttgcatacagatcacacttaaatttacagccagttattgtactcatgtctctaaaagatagcatttgtatgtagtcttggcaagtacctcaaatatagtacataaaccttaaagacaaagttgtgttttctgggggaagatagcacaagaactggaataaagagtcaccctgcaccacactctcctttatccacataattgacctaaaaatgattgtatcattaatagcaaaagcaagcctaccttgtatgtgtctttgataagacttggtattctccataagccacctttccctttactagctggtaactagtactactctagaaatcatcatactttaaatcttaaattcagcaaagtgtaattcataagattaatttagctggaaactaagcctcattctgaagacaactaatatctttaaaattagctgcaatgcccggtgtttcttttgtaaagtaactagaagttacttttcttttctcctttcctttcctcctcttccctttcccttccccttgtgtaacgctgaaagattggtgttataaagttaaaagagggggctggagagatggctcagtggttaagagcacggactgctcttccagaggtcctgagttcaactcccagcaaccacatggtggctcacaaccatctgtaatgggatctgatgacggtgtgtctgaagacatgacagtgtactcacatacataaaataaataatcttttaaaaaaataaagttgaaagagtttgttctaggttgctgttttaggtaccatctttcccttttttccaaaggaaggtgacagagagattgctactaagatgcaggagctcgccctaagtgagggtgccttacctcgacacttacacactgcgatgtttacaatcagttcagatcagcgcatgcttacgaataggtaagttaatggagtctttgtacattagctttctatttagattataaggcaggagcattgggattgcataagtgttccattttcatttgatccatgcagttccatgaaggtttatgctagaatgaccgttgtccctgttcatgatgatttgtgatagggttatggtgggaagatcgggttcctttttctgttgtcagagtcttgattcacagttgtgatgggaatgtaggaaagtctatttagaaacttctaaatcctcctcataggcccaggccattcatttcctgtgactgtttgcatcatacagcccacatggaaagtgttcacagagtgaggttttaaattttggtcagtcaggtaatctactttagaaagagagagagagagagacacacacacacagagagagagagagagagagagagagagagagagagagagagagagagagagagagagagagagagagagggagagagnnnnnnnnnnnnnnnnnnnnnnnnnnnnnnnnnnnnnnnnnnnnnnnnnnnnnnnnnnnnnnnnnnnnnnnnnnnnnnnnnnnnnnnnnnnnnnnnnnnnnnnnnnnnnnnnnnnnnnnnnnnnnnnnnnnnnnnnnnnnnnnnnnnnnnnnnnnnnnnnnnnnnnnnnnnnnnnnnnnnnnnnnnnnnnnnnnnnnnnnnnnnnnnnnaggaggagaaacatagttccaccctaaagtagacttgttccaaatctctgatgaaccacctttcttccagttgtcacttaggtgacaataaatgtaaatcaacttgtttactccaggctgcctgagttccaccgtttaactctatgttttctgatccatgaccgtctcagctgcccagagcacacctgactctgaaattacagtttccactttataagtaatagcataaaccactcattcatggttcgtcagtatctgttacacaaactaactgtattgagtcaaattatttggtgtgtgttcatacacatattttttgctttctttaaatgggtagaacctatatcatgttcatgccatttaaaattcaagccagtcagatggctcacctggaagtgggtagcaagcgtaccaagctgagtccagtctcctggacccatagaatgaaaggcaaaacctactccacagattgccctctgccctctgacacatgcactcacatgcacatagcagcatgcacagacagtacaccagtgtaataaaagagagtaatgctttaaaacaaattagagtagctatcagggaagccctttaaattggaggaaatttgttaatattttggaaaagtatctaaagttcctcttcattatatattcatttttgacagtttctaatatctgaattatttatatgtagacatatttcctatgattatgaaatttgttttttaaaattcctttgtgttgtagctgagctaaagcagaaacctttttcaacatctgcttttttcagacagctaagtagacatctagtgggactctggaccgctgataacacaactgccacaaacttgttgaaacgcatattggtgagtctactgagaaaatgaaaagcttttttatgcctatcagacagttaaatgatgttatgtgtaccctaatggagaaggcgtgtactctcgggcatccacacagtgttgccccggtggccaaaatgtagtgtttgagagttctgatattcagctttgaaggcagaatttcattttcttttgaaagtggactttgtattttgttgttagccgccaggcttgttggcatacttggacagttcagatccagttccggagaaggatgcagaccgcatgcacgtcagagacaatgtgaaaatagcaatggtaagtacgctctccaggccagggctgaggtgctgctgtgcggccctcttctctggaagactaagcctgcagagagagccgccctgagcgctgacagctacggcccctaagatgttgtatggctaattaactttttatacactcacggagctgtgtcactgtcaccacagtctaactatattgacgattgtgtgtttttctctaatccattactgataatatagtcaaggatggctttctttagaaatttccagtgtctgtgttattttataaagaatatggtattgagttctactggtaaaagggataaatactgaataaaagctacatgtaacttttcctctttcagtatctctgttaattattaatgtgctgagctcagtataatgatgcacacctttaatcccagcacttgggaggcagaggcagagctctatgacttcaaggccagcctgggctacagagtgagttccagaacaaccagggctacagagtgggactgtctctagatagacagacagatggacgggtagggcagatggtagataggcagatggtagatagacagacagacagacagacaggtattagtatcttatccctgagtaaattacataagtgtttcttgtgatgctacgtggcatttctcatgttatcttctgtagtcctactcctgagtttgtgttcaccccacttgtatcttttcaaaacggatcattgtgtgacttgagtggggaggtaattaattttcttgtataggaaattaattcattatacaagttttcacttctgctttttcactaaacatacatgccaattttttaaattttcttgtttgaaattgtgtgatccaactatgtatagttttaaaacaaatatgaaagtagctatgtaatgattttaatattacaggatcaatatggaaaatttaataaagttccagagtggcaaagactagctggaaaagctgccaaagaagttgagaagtttgccaaagaaaaggttgaccttgtgttgatgcactggagggataggatgggcatcgctcagaaagaggtaagcgggtgttaggagacgtgtgtgtgtgtgtgtgtgtgtgtgtgtgtgtgtgtgcgtgtgcgcgcgtgtgcgtgcgtacacgcatgcgtgcatcccagtttcaacagttaaagaaaaggaggtcgtggatttggaagaaaacaagggggttgtacataggaggtttggagggaggaaaggaaaaagtgtgtaattattttccctaaagaatactttttaaaaannnnnnnnnnnnnnnnnnnnnnnnnnnnnnnnnnnnnnnnnnnnnnnnnnnnnnnnnnnnnnnnnnnnnnnnnnnnnnnnnnnnnnnnnnnnnnnnnnnnnnnnnnnnnnnnnnnnnnnnnnnnnnnnnnnnnnnnnnnnnnnnnnnnnnnnnnnnnnnnnnnnnnnnnnnnnnnnnnnnnntaagattttagtcagataatataaagttactctcttatgttttctcctacatattccagttttcatagtttgctttgcacatatgaaaatacagtgctcttacctgtttatttagatctaaatacgttttagagatactgtttacattttttagttaaatgtattgtaaattttgtgaaccaaagtcagatgtggagttttagtttcttctagcatgtgccacagaagttcctgcagcctacacacttgtatcatggatggcgcagggttaatgaaccaagtgctgacttgaggctttctaacaacacctatagtgtctttatttatggaggtgacttttttttagtaattattcaaagaaaatcagttagttttcacctgcaaatggatttccagtctgtctaaatataagggaacaaatgtgttgtctgtctgtcgatctaaaatttggatcagtcggttatttaaggagttgagcatagcaggttaatgctaacttagtgatgtacggcggagtgaagagccactccacaggctttcaggccagagcacatcgaggttgtgcttgctaactagtgtctgagcctcacctcgtcacctacttaattgtggcttttccaggaatgtactttccctcttctctaaaattggaatagcatcacttcccgtctctgtctcacagagttgtttaaactagacccttgaagcactgtgtagggcctgttcatgcttgaagcactatgtagggcctgttcatgcttgaagcactgtgtagggcctgttcatgcttgaagcactgtgtagggcctgttcatgcttgaagcactgtgtagggcctgttcatggcggttctgctacagcacttgagcagtagaaatacacacacacttgatttgactactttttagtttttaaaatttacaagtttctggcttcaggtagttaaacccacttctaaagtaacagtttttttcaactttttaagtacaattaccatattatcataaaatcaaataagtttttagtgtctgacttcatatgtagtgtctaaacaacataagattgaccataataaaactacttacctataaagtatctgttacaacagtgatttagaagagaaaatttgcatttttaataccaattttatcttactggtctgttggcattgtttgcacaaactagctaaagttttgagcacatgatcaaaaatatttgagttgggaagatgaactgattatttttattcatttattttattaatatgcatactgtttggtctgcataatgataattgatgaaggaaacagtggttcagctttgtggctgtcacatacatagaaacaaacaatatcagtcatggagtggtcttgtgcctttgttaatttaactggctaatcctaaagagatgtatgtctcccctgtgggatgtttctgggccagttttgagtgctgctgatgctgtgtgttgagttagtagttgtcttggctaatgctgactagtatgttttgttgttgttttggtacatgtgaattttttttcagtttaggaattttctttttacctaggagttttaccttctaattctatacatacatttttatgagaattattctttactgatatgaattttatatttttaccattctaaattgttaccacatttatatgaaagggagtgaatttaatgaaagtgttcattgttgttttagtttgttttttacttcttaagatggggccttactggaacttactctttagttctccagtctcccacttcagcctcctgagagtctagttacagacaagcaccaccatgctggcgggaagtgcttctgatttctaatgagaccatttaagaattggtctattcaaaacactaaactttgaattattttgtacttaagtcactttgtgttagtttttatgatggtgtatggaattaaaatttgtaaacattttcatatataaccagtaaattatatttcaaatagaattttgttacagattaatcttcatttaatcttattctttcaaaaatatcgagtctattttcttgtttatctgagttgccacactatgaagattagacttccaggctgttaactgaagctactcagtgcttgttacattgaacattagggttttcgtgtctgaaatatgtatggttacacttagagcaagcgccccagggtcatgacaacctttaaggattgttggagatcatctccaccttccaattgcgaatcttacatatgtaccttcctctggatcagggtcctgagctttatgggagctttgagttctacaactgcctaagattggagttgtaagcttggaaacgcagatggctcctctgctgtaaaggaaagatgagttatattcgtgaaattcttgtggaatttgtataatagacacagcttgccagatttagattcatagtctcctttttatattttcatcttaatttttttttcttttttgcaattaaattcaggacaaaaaccatatggtgagttaagccctttacatgtgtgaagtgtgctgacctggcgtgtggtgttgtcttgacttgctttagtgtttccgcctgactttacattgcttggatgtaatgctgcttttttccacgttggccgtgcctcttggctttgggagcagtgtaatataattttttacatttgttatgtttttcatgaatttttattagctgcatgtaaatgttgaagcaagtcagtttttgacttgtaaattttactggtgatcagtgtaaaggttgcaagccttggtgttgaaacagtaacttttggttagatgatgatatttgagcgcctataagaacaaatgctagcaaacggtctggtgtaattaatgttacgttgcggcagtttgaggaacttgatgttccttgcgtgttaggttgctgtactgcttccaggtctggtgagcctgtttggccatgaagactggagtatatttgttttcttttccagaatataaatcaaaagccagtagttcttcgaaagagaagacaaagaataaaaatagaagcaaactgggatctcttctattacaggtaaacttgaggcctctcttccagcattggtaagctcgatgctgatgctggaagaaccaggtggattgtctcacgctgaggttactttttctgtcgtgattggttccactgacatgcttttacacaatgaaggctaagtcagtcatccgagttgcttaagttatcttaagaattttagtaaggcttggagatgattgcacaagatactttctatggagtcggattagctgtatacctaccttcagccatattagaaatggagtcttgaaagaggtagactacagaggcctcaaactagactcacagcaatgaacatttgaatggaagatgtttgtacagaaggttgtgctgtgtgacacacagacaaactgcagcttccattgcaagggttttttttttttcctccatctttttttttttttttctttgtgagaggtgttgcaaagtcacagggcagatacaaagtcagggagataagtgggattggggtgcatggtgtaaaatttacaaagaatcaacaaaaagttgagagagagaggagagagagaggggagaggagataaaaaccaagaagatggtgagagatgacccatgccagccctcagacactcgcctctgcagccttgcaaaaccagagaggcgtgtgcggggagacacgtgcagggaggcaagcacatgctttgtgagacacactcagggtagctgagagtggctgtctggaaggtggcatgttcattttatcttgactagttaaggtaagtatttggtttgaaaacacgccacactacttgcatcttagaccatttaagccataggaaatccttaagtatatgctttggatttcttcctcgggaacccttggaaacatggaaccccgaagtgaccctctaaggggctgctgactgataagtagcagataggaagtccgtccaccccagcttagattttgtccacgttggctgtagtggcttttccagcagttctgcagaggcctctgggtcatctgtgagtgccacctaggtggctcatcctgcacagcctgaaattggacatatgacagtattgttttctagtttgaacttttgttagctacagataactgaaattgaactatccatgtttaaatttcatacaactttatctaatatcttaaagttcaggctttcaccatttatattgaaaacttccaaaataaaagaattttatagtgaatgtgtgttaattatgagattctaccaatgacattttattttgcttgcttaatacatattttattgtttcttggcaaggtttaatagtcttgtgcttgtcttgcttattataagatatagtacaggctattggtaggttttgagaaatgcttgtttcatacgatttcctcatttcatgtgtgtttaggtttagtcaagaccacgctagatcgaacctcatttggaattttaaaacacgagaagaactgaaagatgcccttgagtctgagatgcggacatttaacattgatagggagctgggcagcgccagtgtcatctcctggaaccaccatgagtttgaggtacagctttgtcttcacggcatataacccaaaaaagggaaagcacatatgtaaccacatcattatctttccccacataatataacagaaaatattgggaaattctagtctttgcttgagaccaaaaaatttaaaaatgccttttaataagttattcaacatacactgagaatcatgtgtgagtttgagtaaccttggcttgtgcgtgcagatcatcttggcatgttcccccacacctgggactttagatttgttctttattggaatgtagatttccagattatgattagattctggttgctgctttgttaaactaattgatgtgaagaacagagaacatacatgatagataattttacctgtgtatgtatgagtatgatgatgtgtgacatgcagtcatgtgctacatgttgttttgcttattcatggagcataacatcagagccatctgtgtttggtattaagcatgctctgggcttgttgcaaaaaagcagaataacccagcaacaagggcttctcagagcatatcctcattgctaagtgatgcatgattgtatataattgaaaccagtgtaaccattggtcagacacataatcctgctggctttgatctttaacccagcttctaaagtatatcatttaaatgtcatcccttcctggaaatgtttttgcatactttattttaaggcgcttgcagtctcctaagtttccttcgattcttttcagttttctcaagtcttctcatctctgtggccacagctgacctagtatcttagggttccagttgctacaatgaaacaccgtgaccaaaagcgcattggggaggaaagggtgatgtggctacacttctacattgtagtctaccgtggaaggaactgatgcaaagaccatggaggggtgctgcttgctggcttgctctcatggcttgctcaacctgctttcctatagaatccaagaccaccagccgagtaatgggaccacctgggatgggctgccccccccctccaatcactaattgataatttgccctagagacttgcctacagccccaatttatggaggcattttcttaagggtccctcctctcagatggcttcagtttgtattaagttaacataaaactagccagcaccactgggaattagttcttgggcctctatttatatccattgcttgattcatcatctcgtgattattttgttgttgttgttgcgttttctgaaagctcgtcaggttttgtctcctgcttcgattttctttcctacactacgtgcatgtgttcaaatcttattgtctgaccatcactgccttcacccttgcccccctgtactctgttccatgtactcctgtacttgcacacggtgacaaggtcatctgattcctagtcaggtagagtgttggacacagagcccagtgctgcagtgctggcctggcatgggtgaggccctaggttcaattcccatattgcagcaaaacacagatgggagtggagtgtataatttctctgcttacgcctttgtgcacctgtggcttgtcacctcatgtactattaatctgagttcttgaaatgacttccctgtgtatccctcaaacaagagtggttttgctttgatcttatctcatgcttctcccttgactccactcacactaacttcccagaaacaccacatgttcttaacccaagatctctctacttaatattagcctctgcctaaaataaaccttttttcccctggaaagcctcataatttgttttctcatcttcttcaggtcttttcttcagtgtcatcatctgatagaccttccctgtctatcctgtaaaagcagagtccccttcgtattacacatacgtcctatgtgttccctttcctgtccacaggcctgcttcatgctagagcacttactatcacccaaaaattatatacacggatttcaggtttcaaaactatttaagatatatttttagctgttcctccacaacttcatgcatgcacacagtatatatggatcctactcatccccccactttaccaccaactactcccagaggaatcgccacatcccctcacaacttcattccctaattgtagttttggtcctggctgtcctggaactcactccttagaccgtgctggcctcaaactcaagatctgactctctgcctcctgagtgcagggattaaaggcgtgtaactgactaagtctaatgagtgctgccccatatatgcttggtaggagcttgagcagccaccaagggccacacccctaaagaacctgatttcccctctcctagcagccataacgttcagtagctcttcagccaaggacagggttcctctgatgtgtgctggaatgctgactagcttggtcttacgcaggcagccagccagccagctaccattgtggtgcgctcctaagtgcactggtcctgtcatttccagaagacgctgtttcctctggccctcccccacctccagctctcacagtctctgcttcctgttcttcagtgtccccgaccctaagagggaagagtgtaatagagatgtcccacttaggtctgattagtagtgagtctatctacataacagtccctctaatgaggactaggagctgcattaatctgtggggacacagatccatgtttacgatttatttaattttaaatttttatgtatttatgtgtgtgctgatgtgagttttgagtttatgtgtaccatacgcatgcacctgcaggcgccagaggaggctcctggaactggagttagtaaaactgcctgatgtaggtgctgggaactgaacctaggtcctctgcaagaacagtgtgtgttcttaacccctgagctacccgtccagttcctggaattgcatacttagaaggcattttggtactgtgttcatttagcaaaataatcatagtaggctcacgtctgaggccgcagattgttggctagatccactgtaccaggcataagtttcctcctgtgcagcagccttaagcctaagctgaactttgttttacggctgctaaatctccagtgtacagaataagaatagtgctatcacaagatgatgctcagtagtagaaattgagtacattgaatattcagaatctgcagaagaaaaggaaagtagatataatatactaatgtacttttttataaagcagttgttttagactttgtatagagaattttgataatgtcatcagggaattaatttttacagttattcataattctttccttgtgataagcagcctaagttgtgagggtccttttgttcttccagagtctggtcgtggggtttccctcacacatcccctaccctgacagtcaagggctcctgaggtattaagatgtgcttaccatgttgatagtaggccttgttgttgatcaggcaacaaaggacgagctgaagcagcctttgtgaggcgggcaggcagtgctgcagggaagactgtcccctctgcacagctgtggaactccaaactgatgaagcacagccatgcataacgtgtcggtatctatctgaaatagtcacagtttaggaataatagagacctcggagatggctcaggggctaagttcagattcccagcacctacactaaaatgctaagtgtgccactagcatttcagagtttagtgcctaggaccaactgtacctccagtctgaagggattcattgcccccttctggcctacacaggcactgcacacatgtacacagacttacatgccagcaaattattcatacatataataaaacagaggggactgggcagtgcaaacatggcagcacacatttgcacctgggttgctggtcagggacagatggagacagcagatcccatagctcaagaacagctggtctagacaagatggcaaattccttaagatagagacctgtagacggttatacccggtgttgacctctggcctttaaacatgcttggagacacatacacagagtatattacttttttttttttttatgataaactcagccaggcgtggtggggcatgactttaatctcagcatttaggaggcagaggcagacagatctcttgagtttgaggacagcctgttctacagagggagtgagtttcagaatagccagggctacaccaagaaactctgtcttgaaaaaaatcaaaaggaaagaaaacaagtgttaagccatgaataagaaaaaatctgttataatctaaactggtgtttatatttgttaataaaggttaaatatgagtgcctggcagaggaaatcaaaataggagactattacttgagattgttattggaggaggatgaaaatgaagaaagtggatcaataaaaagatcgtgagtctcttttcatatctccatggatttgctgtcgctatttgtttcctggttgtttctattgaatctctttttaaatctaggtatgagtttttcaatgagctctaccatcgcttcctgctcactccaaaagttaacatgaagtgtttgtgtttacaagcccttgctatcgtttacggcagatgccatgaagaaatagggcccttcacagatacgagatacatcattgggatgttagaaagggtaaggccactgtgggggaagggtgctgatagatagcgtcaaaactaagctgatggcattgtcacagtgactttctgcatgagtttctgtataatagctattacagttattgaaattttactagaaggcataggaaaatactggtttgtttttttcagctcttgattttgagcaactttagtgactttgccaactttaaatgtgggagaaagcaagaggtgtataatagaaatagtaacttccagagttgtatctttgagttttcattttggaaaaaaatcatacatgtttctgacattaaattttaagacagtgaagttgcttagaacactggtgattttaaaaaaggaaataagttagcttatattttgttttatgcagcttaccattcaacacttgagcactggggtggagtgaacttggctgtgatgtatttgatgcagagtatgtccttcattcttgcattagtatttatattcttctgttttaaccattttaatgttcacacattgaatgaaagagagctgtttcacagttttcagaatagccaaccgtgattgttgtcaactctgaggcattgctttgtggaaagttcatgaagcaagcagcacagccagtgtgaaaaccctgttgctagcactgacctgagccgcaccattgagtcctttgttctctttggtttgtgtgtatgtgggtgggggaagggggggtggtcaggagctttctcagtggcctaggctgcctgcaaactcagtgtatagctctggctgcaccttgggatcgttcttgtttcagccttccaaatgctagactgatagcctgtgccaccgtgcctattgtgcagtccagaaccctaactgtcactccaagggactggaggactgtgggcactgtgctttaggtactcgcctttcccatctcactgactcatttcagtgaaccatttgcaagtctggggaattcacttcatgtctcctaaaagctgctataggagtctctgtaatgacataagaatgtcttccctccaggaagttagagcagtgctacaaatccgcatgtaaagtaaaaccctgaagaattggagtgattgacaggcaggcagctgcaattgtttctttcatatctcagaactgatatttcttaggagctgtccgttgattttgtgaagctgtctctggattttttatccactgttgactgaattgtcatttatttcatcagtgcactgataaactcgagcgggataggctgatcctcttcctcaacaagctgatccttaataaggtacagtatccctgtgagttactgtcacttaataaggtacagtatccctgtgagtcactgtcacttaataaggtacagtgttccctatgagtcactgtcacttaataaggtacagtatccctgtgagtcactgtcacttaataaggtacagtattccctatgagtcactgtcacttaataaggtacagtgttacctatgagtcactgtcacttaataaggtacagtattccctgtgagtcactgtcacttaataaggtacagtgttacctatgagtcactgtcacttaataaggtacagtattccctatgagtcactgtcacttaataaggtacagtattccctatgagtcactgtcacttaataaggtacagtgttacctatgagtcactgtcacttaataaggtacagtattccctatgagtcactgtcacttaataaggtacagtatccctgtgagtcactgtcacttaataaggtacagtattccctatgagtcactgtcacttaataaggtacagtatccctgtgagtcactgtcacttaataaggtacagtatccctgtgagtcactgtcacttaataaggtacagtatccctgtgagtcactgtcacttaataaggtacagtgttacctatgagttactgtcacttaataaggtacagtattccctatgagtcactgtaatacggtacagtagtccctatgagtcacggtcacttaataaggtacagtgttccctatgagtcactgtcactccccaggcctgcgcccgggcactgctgacctgccagacaggtcacccacgggggctgcttttctctaagatgagaaaactgggtttatagagggaaaggtttgctggttttcctgagtggtctgtcctggtgttccaggcgctagatggagcctagtcctttatgtttacagaaacagacaggaggtgctggaggtatgtatggctcagaggtagagtacttccccagtgtgtgtgcagcactgcataatttagaacatggaagagttctttaatgtaccattttatttctggttactggataacctgtttactggtgggcaggataattgtagggctagggtttatcatgccgctttgtctttattgggggaggaaagtgcttactcagactgtattaagtggacattcttacatgatctctttatgggataattttgtcttttgaatcctacaaatgccaagtaagtatggttgcatgccagcatgtctaaagaaattccacatgtgctcatcctagagagtgttctaggttacagtgccgattgaagagaaaggctttcaattatgcaaaaatgctttcctctttcagaaaaacgttaaggatctcatggactcaaacggcattagaattcttgtggacttgctaactcttgcacatctccatgtgagccgagcgacagtccccttgcaggtacgtttgctttctagcttctacaagttgtgttttctttggatacaattttagactcacaagattctttgaaatctgcacctgggtttgtgtttctccaatgaatacaatcgtgtgaatgctgggagattaatgcataccaaaaaaaaaaaaaaaaggaattattaccatcagaatcagttttattacttgataacatttgtcttttatgataaggtaactgtatcgctaaaaagtggcttggttttaatacaacgtgacctttcagttaattattggatatgtaactagaatatcatcattgacaaacatcaagaatatgttttgccctaaggccattggggacattattcaaaccatacaacaggacaaagccaccaaggccttctctggtacttgatttaaagaaagatctatattttcgcctatttgatgttttatgtcttcagatatatttttctggttcaagatatttatgacaaaaagagccttttaaatattttagaatggggcattttggggtttgggtatgactaataaaaatcacaacacttgttaaacaccattgcagtatactaaggactgttctgcaatacattcacacttgaaacccctcggtggccctgcgtggtggttaccatcactcttctgttttgcagcgcagagcctaagtgcattgccacagtcacctgaaagctcagaaccagttagattcaagaagctcagttttgctttatttgcagtttatttagccattttgttttatttacagtttgactctgaaagctgatcgttgcaggagttatttagaaaccatggtacacaaaacttacattaaaactcttatcttcccaaaatattaaaaaactaagaattgtctgtgatgctaagagagaaaattattttttaaaaaaaaacaaactagtttttctaattttagttagttttgtctgtgatcctggaagttggcagcagtctgagccaaagagtagttcatggttctgtgtccccatatttatatttataatcaatggaaaggaagaggtggataaatggaggaggtaggggaggtacagggaatcgattgctgcccacttctgccctactcgagtatgtttgagcaggtgactcactaaagctacaatgggctgagactccgctgcttgtcataggagtagattaggaaatgtctccctggtgaagttagagttcactctacagagcggtcttcaggtagaacctaagcgtgtgcagccgcagcccttggtctaacagtgtggggaagggacagggagtgttgaccctgctgaagcctgcgctggtgctttgtcgctgatcctaggtgcttactgaagcccagttcacacctctcccccaaaactttaatatgttggacttcatagtttcaggttaatacttgtttattatgtaattatttgcagtattctttgctactgaaattttagtgccctgagaatttattaatggccacagggaatagaggtatccttaaatttagataaatgagtgaatttaggaaattgtttattaacaaaaaaataacattgactgttccttgggcatttggtcctatttctgaaggaatttaaaagaaaaaaaaatcttgagaccaaatttggtactgtgtaagttgttttatggaatctgccttagaaataactgaactttgttctatcatagagcaatgtgattgaagcatctccagatatgaagagagagagcgagaaggagtggtattttggcaacgcagacaaagaaaggagtgggccgtatggatttcatgaggtgtgtgctgtgtacaaacttcttggaatttctactttgttgttttttctttgagaaagactcttccagattttaccgtgtagcccagacttgatagataccgacaacacagatgagcagcatcatacctggcaggcctgtcttcttatgccctcttatttagtactcatatagatatacagtatttaaatttagatactatttttatttatgcagatgtaagtgttggtaaacgtatgccacatgggtgcaggtgcccaaggtggcctgaatagggcatcagatggcccagaactggagggatatgtttttatgagccacctaatgtgagtgctaggaacagaatcctctggcatagcaggatttgctcttatcttcagagccatctctccagccccaagaagtacagtgctttaatctgattactgtgttcagtaccagtggtcatataactctgtttcctcctaaggaattaggtgacttagggttctagagatgtacatccatgtacagaatgttacatggaatcttataaggcagttgttacaggactgatactcaagaagtagtgtcgagttttcagtgaattgtatacagtaatgattactgtcctaattatatgctactgaatacgtttggtactatataaatgtttaacagtgtagggaaggggcagaaagtatttaacctgctgaagcctgtgctagtgttttactctgatccgagctgcgtactgaagcccagtccaccctacaaaggaccttcagaaaaaaaactttaatatgttgaacctcatagtttcagacttcacatggtatgatcaagtttttaatatgtgccaaagatgagggagtatctgttagttctggaggcgagagcatcctccttcaccacactgtctgaccctgtcctcctaggctcagcctcttaggctcagtcagaattggaccaaaaccgttttaagagagccaagccttctcttccataatttggttattgtccactctgcctattatttgtgcattttccagtggtctttgtactcttctgttggccaattgagtgcttattcttacattaatagtcaactttgggttcctgaaaagctgctggcaagatcttgtgtattcctagtatatgtgccatgctggcacataagtgtctcatagtggaatgttgttttttatgtaccatactgatatagaaaacattggcaaatgtttcatttgatattgtgtttgtaataatgatgccttcaatcaattaagatgcaagaattatgggccaaaggaatgttgaatgcaaaaaccagatgttgggctcaaggcatggatggatggcgaccgctccaggcgatacctcagcttaagtggtgcctgttagccagtgggcaggctgttctgaatgaaactgaccttgctaccttaatactgaacatgttgatcacaatgtgtggatattttccaagcaggtacaatgtcattaatgtttttatgactaacaggggttctcagacttcctctcctcccattatgtaatgttacagggttacttactatagcagtttaacagaggtgtcctatgtggcttgggatactgcttccttgaaacagttataaagaaatagttggcaagttatgttgatgtggtaaaaactgaaaacagccttttctgggggggggggcggtgtcaaataatcttccacaatttatatgtaccagctaggctctagcagtggtaagaatcctaatattcatatgggttagataggaatggttggaaacagctacctgtagtccatgtcaggggtaggtgccagatcttgatgtgccaggatagccaggcctgctgctgaagctgggatgatggtcagtccacagctcactccacaggaccaagcaggcgaggatttgtttcctgtagtaacaagcacatttgtgacctttacctagatagaatatttcagtgttcataaaatatttgtatacacatcattttgttttaatgctattctaaagatacctgctagttagaaattactagaaaatacatataacactctgtgttcatctgcagatctttaaaatcagattagattcaagccatacagttaatatttagaaatagtagtgcattaattaaagctgtatttgaagagtactgaccttcattaaactaaggtttaagttaatttgataaagcttgatagaacctttggggggactgtccacagacagtgtgttagacaacacaaagtttaatcaattaaataataaataagagtctttggctcttctagggtactgtttttcaaggaaatcttatggaaggaaatgaagtcatattaaacagccagtagatttaaaccaaatacctaatcatgttcccagctgtatgagagcttagtcttcatttacaaaagaggaaggtaacttgcttcatgcctggtagaatgccgtatgctctgagtacacactttccaggaaatacagtaaatgttgaccgtagaaaatattttctagggaccaggataatgccatcattcgtcctctgcccagagtgaaaagactgctgtcagatagcacctgccttccccatgtcatccaggtgggtcctcgtgtgctgctaagctagaacactaatgtaaaaatcatgtgatcatactgtagctcttagctttattataatccattccattttcatggagctgaaccccaagctacatttgtttcatttattcacttattcttattttcaagtcttgtttatttttagtgtgtttgggtgttgttcctgtgtatatgtttgtgtgccatgtgcatccctggacccctggaggccagaaaagcgtagcaggtcccctggattgggcttacacctggttgtgagctgcgttgtaggtgctgggaaccaaatccagatctcctacaagagcagtctatgttcttaactgtggagccatctctgtagccacagttctgcattctaaactaggtttttaatctgggtatactggaaatgaaatgtgtgatgtcttcttcagatcccagattcatccaaaagggattttatttagagtctattcttcaaagtcacatcactgtgggagctgcaatggtgctctcctttgtgctgcagaggatgcagcagcccacagataagggcatggtcatttctctgacaggtggcaaaaatcatcaccacagatcagaaggtctgtgtagtattaatggaaaaatgagcacacctcactagtgttttcctcgggattttactgttttcagatgagggtttgttttgttttgttttgttttgttttgtttagcaaccacttcaaagcatagagttggatatgtaaagtatcctaaaatttcctttctttctgcattttgctgttcttttggaatttacagtacctatacctgagactagcataaactttagagatatttaggtaaacttcctgttttttccttattattccattcttagaggtatgcactcatttttccattaatactacatagaccttatgatctgtggtgatgatttttgccatttgacattgagagtgagagtttatatgttcttacatttatgtgttacattatgtgtaatcactgatttctgaacttgaggacataattaacaccttttttatttatttgaccagcatcagcatatgttatagtaacttttctattgctgtagagagacaccatgaccaaggcaactcgtataaaagcaaccatttaatgggaggattgcttacagtttcagagtcatagtccattagcagcatagcagcaggcaggcttggtgctggaaagttagctgagagctgcatcctgatctgcaagcagagagagcaagctggacctatcaagggcttttgaaacctgatagcccatccctagtgaccccctccagcaaagtcacacctaatctttctaattctattaaaggattttactccctggtgactaagcgttcaaatatatgagcctgtggggggccattcttattcaaaccaccacagcatgcttatacatatacttttcctattatggacatttctgttcatatgtctaagtgaaagtgcactataagtttttttaactgttactagccaatcccagaagagcaagtgagtatgtatctgaggtaatacgaaaagaaagggatttgtgctcattggatcctgtcaacatgaagataaagtacccagaaaaattgtcccaaacattctccaaggtttctaatactgaaaagaaaaaaagtaaatgcaaggagcattgcattcgaggtcaagatggttgaaaataattaaccattgtctgtatagaatggaacttggtcagtgaagggtgtctactttgaataatcaaaacttttagtggtatctgaagagaaaggaaaaatgtgatgaatttggcccccattcctcgcaagaaatactctcatctggaactcaccatgtaaacctgttgtcctgagctgccagagctctcttgcctctgtctgcttcctgagtgctgggattaaggtgtgtggcaccatgccctgctaaatttagcatcttctgatggcatattgcctgtttattttatactgggttctaaatctttcttaaaatactttccctgtagtttaaaggagcactttatcttgctggaacacaggtaactcaggctgttttccaagcgctgtgccctgcttaggtagggtcctgtgtcttctcactgttttggccatatgacggacagcacagcttaagaaatcagtgagtgatatagtgcacagtgaatggatggtctcggtttccttgtgcaggacaacttgagatactctgttgttgattgataatgtaaggctgtttccctatacctgatctcaagccacatctgccttcacattggagaaagtcctacatgattgtctgtgactgttccttcctgaaccttgtcatagagtagaacactgactgccttgttgagcagataggacttaaagcaagagaaatttaacagtgacttaaaagacaaacagttgttctttctcacgactgagtctagactattggcctgtcaccaagagccagtgcttgcattacactctgtcctcagctcactgaaactatcagcctgtcaacagagccagtgcctacaccctacattatctgctgctgggtttggtcttactagtagcaattaacttcacatttggggttctttggaagcaagtgttcattgaaaattgaaatgtcacctttactgtgtaaataataagtataactaaaatggcttagcacacattcagagcagttctgcttagacctttgttagcctggatgtagtgagtggcctgagggtcccacagtgtcctagagcccattgtctttcagggccttgtggtagtggcagcctctgagttgcactttagccctgttctcattcttgtttttcttgtcaagtccagtgtccttcagagaggttttcatcatgtcatttacttgaaactaatgcaacacagacacacatgacatgggtgtatacacccgtgatcatgtgcacataaacactcatgtagacagcacatgcatgtgcattagaaatactctcaagcaatcaactttgcctgaacaacataacaaaactagctttggacacactcgggcttttatctgaccatgttttgatcagttctcaacagtttcctgcatcactatctgcagtaaatgtagaaggagccccttttaagtcggtttccagtcctataacaagtttattgagtcccatggatctaagaagtgataacctcagcataactcaccaagcaaaacattttatttgctatttcagttactgctgacctttgaccctatccttgttgagaaagttgccatcttactacatcacattatgcaagataacccacagttacctcgcctctatctcagcggagtgtttttcttcatcatgatgtatacaggttccaacgtgcttcctgttgctcggtaagaccatgaagaccctgtcttaaattgcttacagttatgtatgggtgcgctcaataggaacttttgcagcattgctttgtcattataattgttaccttaattaaaatatctaaacatttggaaagtagaagaaaagaattgtgccagtttactagaactagtatttgaaattgattttactatatgtatgtacatatttaatatagatacatttatgctatacatggagttttatattttgctgtctaaaataaatattttttatataactatgtaacccttaagatgatcatcaaaatatttatggcacacttcgggccttcaaatatggatttatgagttgcccttttatttgttttttcaccgttttaaaatttattaatgatccagtctttagaagccttcagactaaaacctgatcagtttctctatctgaaagatactctggtttttttctaggtttttaaaatatacacacagcaaacaggctttcaagtctgaggaggtaagcacgttagctgaccccagagctcagaccctgagtgtgctgtctgtctaggcgctcagtttaggagattgcaggtcctggttatcagtgcttgaaagtaggtagtatgtttagtaactcattcacattctttgcagtacccgcacataaaaaggtaagcagatgtttaaaatgaaaataaaacatgctgatactgaaatcacaaccatgaattaccctttgaaagcttttggtggtttttataaagacttaatcatataccaaaatctcttaagattcattaatgcttgagctttttggttcagaccccaaggcagacatgctttgaggtttcttttgaagctgcgctgtgttcgcgtgctctcagagtgctcttgcccttacctgttaactgtggtttacagagagacttcactgtcattggcagttgttccaaattcgctgggcttttgctagagcatttaatttttagattttacccaaagctagccaccgttgaagacactgaagattgttgttgttaaagccacttcagtatgttagacactagacagcaatgaaggcttcatagaatagccactgaagccctgagagtaacaagtttgcctggcattattaaagggaaacagatggtggcagcctttcacttcagataaaaatagtgataatacagtaagtattaagaatagaaataaggatacttagaaataatgatatttaaatagcatgtctatctaatatagaaatatagatagtataaaatctatctttagtgatagagagaaaaatagttatacttaataccatattagtcatttgggcatcctttttcctttatttctgtgcatcagtagataggtaatatcttaaaacagctgggcatgggggttgtgtgtgtgcctatgtgtgtgttctcctgagtacctatgtggaggcaggaggtcaacctgagatgtctgtctagttacctaggtttttgagacaagctctctcactgaagctgaagactggcatgtggacttggacacacacacacacacacacacacacacacacacacacacttgtgcatgtgtgcgccctaagaattttcaaaaggagctagatttacttggttttgagaatggcaggtatgggtaggagctgtaacggttggaatagtacaaagtagatgatggatatgacggatgtccctgtggctcttccttgttgtccgtctttgtgatccatggccacaggttggctcagcatccttactcctgtgtggtgatataggtgaccctgagacccttaaggctgctgcaaagctggctgttactgctgcccttgatgtcactgtgttcctccaactccctagagcacagaagtggtttgttctagttgggcactgtgttagtatgtttgtttgtgagttttgagacaaggtttccctacatagccctggctacctggccttgaactcatagagatctatcttccccggccctgggagtgctgggattcaagtgtgccccaccattcatggccttgtgctcctctcttgcaatgctcaaattattcatttatcaaagtctttaaaggtgattttattctaattacattttttctatttttgttgctttctaagactaaaggacaagatatttttcagagaagtatacttggacatatcttacctgaagcaatggtttgctacctagaaaattatgaacctgagaagttttctgagattttccttggtgaatttgacactccagaagcaatctggagcagtgagatgcggtgagtaagtcctagcggggctgcattgtgttgtgtttgctgctcatcacctggcctgctctccattgcaagatttcctaccagtttccttatgttcgaatccaactaataggctttgacaaggcctgaagcgtcaatgatagcagttgataaattactgttactagagcctctgtgtgacctgttaccctaaagggaatactgtcaagacacagcttttacattcttggaaataggcccgtacttcacagattttgcctacatacatagaatagatcaaacaagagatgcccaaaagaattttgatgtgttttctagcatgcatgtcttgtattacaaggaaaagacttgccatgaaaaagcctgtgaaaacacagaaaaggcaagacacagaggtgcatggcggtgtatagtacccacctcacttgtccaccctgggagacatagctgttcatagatccagggtgacggctgccttttggaagccctcacctgtcttagctgcgtgacatttgatcttggagtcacttagttctcaggccagctttacattttccataccatctatttattatcattgactttttgggataggctaacctttaggcttgttttatgccggccaccatttttaatggtgacggtctgtatgccaatcatttttcttgggaaaaatgtgtaagtatatgaacaaattaaaaataattttgtatataatgtttttctttttaaattgtctgagtccttttccctgaaagagttttcttaccaagttgagttctgcttagcttagggccaaataaataataccatgtaatgagcttctttgaaggcaatagtgagcctcagtccctggctatatatgcaaacaccgtcagaccttgtaatggctcgagcttttagtaggaatgaccaagcatacacagcatgacttaatactctgagtaacatttggtctcattttatagtcgagtagttctaaatatttatgtaattttcttgtgtgattacccatgtatttctttaagtaaagtaacccttcagagtgcctgactggacgcttctgtgattgtaggcgtctcatgatagagaagattgctgcccatcttgctgacttcacccctcgcctgcagagcaatacaagagcactttatcaatactgtcccatcccggttattaattatccacagctagaaaatgaactattctgtaatatttattacctcaaacaactttgtgatacactccggtttccagattggccaattaaagacccagtaagttcagtttgttccttcttaaactgcaaaaacagttctgaacacttctgaatgtgttttccttctgtgataaaaggaatgtccttttagatagtcacagtactgcatgctgcagtccccaatgcttgggaggatcaggctggaagattgccaaaaccaaagttcatggcaagcctagacaacagtgagactctgtctggggatgggggggctctagggacagggggagatggacagacagtcaggggaacactctgtgtctctctctctcttcagcaatatgtaatgagtagtttgttaatgcattttgggtagattctgaactctggaagtttttatcttttatgaccaagaccagtttcagtccctggcctgtgcccggctctgtgggacattgatttcaccaagccttggttcatctgtaaagtgggggtgatagaaatgttagctgctgtctgtaatggaggctctgatacttgaatgttcacgtaagcatagctcctgcatgtgcaagagttcagacctgttctgtatgccctctgccagtcctggtgtggctttgggattcctctaacatggagccccgcatctgtggaaagcaggaataaagtaggtctgggtggccatgctattactttctctatagcagaacttacatctaaaagatgggagaatgtttgccattggtgccacgtaaagaaaagcccagcccttgctgagatagagctctgcacgcaatgataggaaacttatgagcttgttaatgagataggtgtttaatgtcagctccctcacgggttcattggaaaatgtaccttacatattagtggttttcagattttaaagaattagctttggtagggagcccccgtgttcccttgtcatttgggagctgaggaaggaagattgcaagaccagcctggcctatatcaagcaaaataaataaataaaagaatctgacagctgtgtaaagctgtctactcctttagtggataggcgtgagataggtgttagccgtcctctcttcccttccctctgcggcttcagtgagatctctgtcttacatttgtgtgactgtccgaatagcagtgatatgtaggtgatcttaagaaaggttccacagtgtgcttgctttcttagtacactttatcttttactaagtgtgaggttttctgtgttttatgaatgtttctttaaacattaattactaagacacatgggataagaataaaaatacaacttaaacagaaggaaattctgtaacaagtaccctagctgccaacattgacttatatagcacaaatattatataaatataaaattttattttgaattcttttattttgctagatgctgatttttggtcctttgtctttaaggttaagcttctgaaagattcccttgacgcttggaagaaggaagtagaaaagaagccacctatgatgtccatagacgatgcttatgaagtgcttaatctgcctataggccaggggctgtgagttatttcagtatgataggagtagatgtctgcttccattttaaaagccatacttacttacacacaaggcctatgagaatcatctggaattcgaggcactgactttgacattttgttcttgttggtaaccaagaagaacagtaataaagtgtgcagtgcacctagccctcagcaggctcatggctcccatgcacacactttctcctgcactgtctgctgtgcttggggaagggctgctggagtatgcccacagcactacgctcggattagaattcctgccaacttttatagtgccgtacaccgtaggagaaagtgccgagtaggcatgtttttaaagaacagaataaatgtctttgtaaaggtgtcttacttacttactgatagagtaacaaaattatataggttacagtggcattggacagattgctggattttaaaacatactttttattttaccaaatcccaaacataattctataatattttttaaatagataatgttaaaactatattataagcaattaaattttataagttgagccttgcttagggaacttttagcttttatttcactataaagataacataaaaatataatcgtacgtaaatcttactggatttaattggatgcctactacatgatcaattccaaatgtggggtcagtaatacagctcctgacatatagacgttagatgattatttagtcctttttcatgtgccttactgtatttacaaacagtttccctccttccaggcatgatgaaagcaagatcagaaaagcttactttagactggcacagaaataccacccggataagaacccggaaggaagggtatgtgctgccttgttttccttctgtaccccgtgagcagggctctgcctccagccctgctctgtggctggcttctcaggctgttgggagggctgggcctgtgattagtatgttcagggcaaatttattctccagccttattcatttctgtttgagaattaactctaatggctaacttataatcataatgaataaactttatttaaggtctgtcataaccgtacagcttaaataattaatgttcatggagtttggtttttgtgtttggttttgttttttcccctagtgacacccaaaatctgtttggctggctggctggctggcttgcttcnnnnnnnnnnnnnnnnnnnncctccctcccttccttccttccttgctctctttctctctctttttctctctctctttctctttctctttctctttctctttccttccttccttccttccttccttccttcctttcttccttccttcgtcctttctgagacagggtttttctcttggctgttctggaactcactttatagactggacaggccttgaacttgtagatctgactacctctgcctcccaagtgcgggattaaaggtgtgtgtcaccactgcctggctgacacccagattcttatcctaagtgaagaattaggaaattggaaatatacaatatttctgagaaggaagacttgatattaaaaagatgctgcgtgcacgaatgtaaacactggcttttaggttcatttctggtttgttttgatttagttttagtttaatgagtttttgttgtgattgctttgttttatgaacttacagcaatccaaattcatcagaaaaataaaatttaaaatagaaagtttgacataatttgtcaaattgcaggcttaactctttagatattaaaatactatataaaactattgtagagaaactgacagttgtctggcccttccctaagggttcctgctgctgctgaccagtgttttgtttctgggtctctgagttgcagggtcctcatgaagacactgagggtccacactaaaatagctcttttgcagattaaataggagaacagaatttaacacagtgcttggtatattgctcagtacacagtagcactgggggtcagaccacgaatgtctggctggtcagtgacagagccagggcacaaaagtgagaagagagaatgaacccacaagtagcccacaggttctcctctcacctctatcctgcccctcccacacagatgaaaatataacttaaaagtttttaaagaataaaattaacagtagttcttatcaataattttcttgcattgagtcagtctctgatatatattaagcttagggatttttcttgtgttttttgttttgagattttggagttttgggagaggtttttttttgagataggatctgacatattccaaggtaatctctagttctcatatagccagggaccttaaacttttgtggcccctgtcctctggggttgcagaagcacatcactgtgcccagcttacttggtgctggactttaaacctaggggctttgtgcgttctagacaagagccttgccatttaaggtgcatgcctaggcccttagtatgtgtgagttcatgtatacttaatgggatatttaaattcttatgcaaatatttttcttccataaaattgaagtccttggatacttactcagggggaaagtgtagtaccttcttacagtaaaccagctagatggcaatgggaatgaattccttaatgtgaaggtagaatagataaattgataaattataataactaagtaccaattatgtcttgttttaatttaaaaattccaattaaaacctaattgtctgtggttacatacaggacatgtttgaaaaagtaaataaagcatatgaatttctatgtaccaagtcaacaaaaatagtggatgggccagatccagagaatataattttaattctgaaaacacagagcatccttttcaaccgccataaagaaggtaaatcctctgtcatgatagattgtggcttattttctagctaaccttactgggttacttgttttgcaacatattctaacagatttgggacttttattacaaaggactctgggaattttaggtttgggatcaggaaagcagttgttttccagaggaagggctcaagcagtgtctgctgtgggcctcctgctgcctgtgggtttcaaggtttcactattccttctcaatgatgcttctgctctgtggtgctacatggttagggctgtgttttaccatctagcagcgagcacattaaattatatataagatagtaagaagaaccagaaacttaaagaccattttatgattttcagttacatgtatagactacctaacctgcctccagcagcctcagagagtggagaatgaacaacatgcatgtttgagtgttttttagcagaagaaacttgacaagattatccattgcacatctcctacttcatattcttattctcaagatgctgtgtcctttgaaatagttagaaaagcactggtttcggtgaaataagtgtcatttcagagttgtctaaatgtagtcctagagttaaaaagcccagagtatctaagtgtatgttgaaatgtttgactctttgttgagtttcttaacagcagataatctgttggcttaagaatgatgtaagatgatgtggagagagaaggaagtgagagcgcatggtggggatttgagaacagcatttgatgtctggggaacttaggatgagagggagttgtgattggaatttggaaggggcagctgagaatttagcagttggatcattgaggagagcttgctggatgcgctttggtgtatttgtcttaaagagactaggtacataaaacatctcagctatgtggcttccagaggtcacaaatctgcatcaaaatcttgaataatttgttttaaacacacatacctacttgcttactttatttctaaagtcagcttaaaacagtataacttaagtcaggtaattattgatcagctttaaaatataaaaatactttattcctaattacaagtgaaattacagaggtgcttaaaaatcatggctcaagagtctagacaagtggatcagtggttaagactggctgtacttacataagacccaggttcaattcccagaacccacgtggcagcttaacaaccatccgtacctctagttccaggggatccagttccgtgtactggcctccaagagcatcaggcgtgcgtaaatatgcatgcataaatgcagacaagacactcatgcacataaaaaataaatttaaaaatatatatcatgactgattatttgcatagctttgcctcatttaataggtttttcttttgcaaacactacctgtggatgacagctttcacctctaactgtacttatcagaacagaattgggcaaatagttaatacattttctatttagtatttctagtaacagttcatatttcaggatttgtaaatgtttcaaacaaatagtaaaatagaaagagcagggagcctgttcttagaagctgatcacagagtgctaacgtgctcgccacacggaatctcgttcttcttaagagagttgtgtgctgaatgcccgtgtgattgcaggggcacttgctgtgtcttacagcgtgtaatccggtgagaacttataaaggtcacctggatggcagaaagcagatattctgcaaaatcagttatttccatgccaggtgcagtcaacttactggaaaatgctgtagctcgtaacatgagctcaccgcaaaggagaggtgaagtaggagactttaatagaaggctgttcattttttgaggtagcataactgagccttgcttggtgtgaccataacactgtctttctattactttagagttacagccttataaatatgcaggatatcccatgctaattaggaccataacaatggagacttcagatgacctcctcttctcaaaagaatcaccactgttgcctgcggctgcagagctggctttccacacagtcaactgctcagccctcaacgctgaagagctcaggagagagaatggcttagaggtaatagactttccaccggccgatctgtacgcttggccaggcacattaagtggcttttgacaatacacagtctcagtacaaatgaatttagtgcagtttttccttttcctttatcccagcagatagcatagcatcatagtctctgtattctaggcagagagtactgagttcacaggcggtaaagagaatgttgaatataaagtagtgcctgggaatgcttttaataggcagcaaagccctgaggcccctttttacctgcttatttaacagatgtcaattaagttcgtgtttaattaccaaatgggtaacattaaaaggttatgtgctcttattcctgctagaaaaggtttttttacccttcaagtcaaacggagaattaatggcatacttccttcttgacaggtattacaggaggcatttagtcgctgtgtggctgtcctgaatcgctccagtaagccaagtgacatgtcagtgcaggtaaggctaaggaacctccatgatagatgggcacttgggatatcagctggggttcttaaaacacaggccactcccaccctactgagtctctcaccctagggtgggctgcgggtgtgattcaggcaggtttgcagcaggaaccgtaactgtccttgctgcagtcaccttcctccttttaaagaaggtggggtgcagcgtgttgacccacaggctcccttcagcagtcagcagcttcacacgctcacccatctgtcattcttggctcactcacctctgcacttcccagtgcccccccctcccctggtcctccaagtacactaactggctgttgtttgtggaggctgagagagcttggttctttggtagaaaacccactatgacttcacagagcatggcttctgtgtggcccttcatttctctaggctaagagtataaatcagttgagactggctttgagttgcagctgctatggtaaagtggcttatgtgagaagaatttacagtatcgtgccctgctaataaatgcacaaaaacatcttaactaagaatctcatgaactcttagaataaagttgagtaagcatataaggtattaggttttcattctctggcatataatccattgtagtttattggttttttaataacacttttaacatttttaaagaacaaaagtattcttggctcaatggtggcacaaaaacaggctgtgatgtgtttgtccgtggtatgctgacttctgcacctataagaaatcttaagattactgctaatttagtcaaaatgtcctggtaatattagagcatcacatataatattaagcatcgtctcccatctgtgctgatgtgtcttgttgagtcttacataaggactgcgtatgtgactgcttctgtctcttgtgctatctgcaggtgtgtggacacataagcagatgctacagtgtggctgcccagtttgaagagtgccgggagaagatcacagaaatgcctggcatcatcaaggacctctgccgggtgctgtattttggcaaggtagagctcatacctgtcacctgttccctctggatacagtcatcaagggttttctttcaaacagccagtgcttgagttacagccatgtgcttacctaagatcatttttaagtaaatcactggtatctctaagtattcttgtagggacattgctgtacatgatcgggtttgttcctatcctggcacacaaaaggtaacactggagtgacatagctagaagaaatgagtcagacttaacttgaagaagaacagagaggatgggactccaatctaaaagggcaggactttgtaaagcctgtggtccagtcactgctgactgtaaaggcttccaagatctgagaccatgctgattccctggaaactcccgagaagccagctctgaagctgctatggctgactgggaagagagatgtcggctgcgttgagtagaaggggtggaggcacagatcttggaatgaggcagctgggactggggaacttgatcagagttcctcagctgcttctgtttgatgcctgcaggtttaataggaacaaggatgctgatgttgtgttacacaacctctggttgtgttaacagtgctgctgttgatgctttattgcatttaaatggaagtcaagaaagtggattgtctgcgtctttgcacactatgagatgttttgtacaaagagacagctagttgggctgtgcctgttgctggttttccttggcagtgttttcaccccgcaagtcagttctttcttctccttgcagtgtatcccacgggtggccgccctcgcagtagaatgtgtcagctctttcgctgtggatttctggctacagacacatctatttcaggctggaattttgtggtatctgcttgtttatctgtttaactatgactatacattggaagagagtggcattcagaaaaatgaagaaacaaaccagcaggtaactttagcccaaacccaaatagacttttagtaagtcattgggaagcaaagcttgagccattcagagatgctgtgtttgaaggtggctgttgacggcttctgacctcagagtcactgcacagcccagactgtcctcctttctgcctccagctctccagtgcaggggttacagctactcactaccatacccaacacttttgctctgaaccacttgtgcttgagggacgggaatctaaggaacagagatgatagaatattttctgttactcgagtcaattttatgatttcagaattatttatgtactttatataatggggagatataataatatatcaaggtgttgggactagctctccacaacaccactgtacttgtctgatttttgtagttgtttttgttttgtttttttttttatctttttttatttctaggtttatatttatagtcattcatagttcatatttccatcatgtgaatctagcagttaggcctaccttactatctgtcttagttaggcttttactgctgtgcacagacatcataaccaagacaactcatatagaagacaacatttaatcccggctgacttacaggtttagaggttcagtacattatcaacaaggcgggagcatggcagcatccaggcaggcatggtgcaggaggagttgagagttctacatcttcatctgaaggctgctagaatactgacttctaagcagctaggatgagggtcttaaagcccacacccacagtgacacacctactccaacaaggctataccttctaattgtgccactccctaggctgagtatatacacgaaccgtaacactatctcttcctctttgtcctgctctcaagtgattctgtaagacacgtaagacactgcactgggtacagatgaacatgttggtgctaaggggtttccctatctgaaaacaaattaaaactcaaatgcgccggtctgtgaggctgatctgatactcctgtgctggctgtttccagtttgatcattaaaatgtttctgttgtgtcactaatgtaaggagacatatggacatactttaatgtcttttttttttttttttttttgtaacaggaagtagccaacagtcttgccaaactcagtgtccatgctctgagtcgccttggtgggtatttgtctgaagaccaagcaaccccagaaaatccaactgtaaggaagagtttagctggcatgctgacaccctacattgctcgaaagctagctgtagctagtgctactgaggtatggactagcgctagcctgggtttgtgacttgtgaaagtcctttaagtagtaaaggaccaggacaatccctattgctctaagaaacttgagaattgaacgttcacatgcttgttctctcggctaagaagacgagtgtattgagggtttagagcagtgaccacacacctcagtctcacctctgggtggagaattagcttcctgtttctctctttttaaaaaaagattacttattttatgcatatgaatacactaccattgctctcttcagacataccagaagagagcaccataccccattacagatagttgtgagccaccatgtggttgctgggaattgaactcaggacctctggaagagcagtcagtgctcttaaccactgagccatctctccagtccttctttgtttctcagtaacagagcctaccacaattcttaccaaccatgtgtcacaaagaactcagacaagagaatgggtttgcagtgatgtttccagtcagggaccaagtttgtttagatgtctcttataagtcatagattattcttactgctacataaatgtatttatacatcagtatttatgcatatttcaagatgaaaatcagcactacttcagcgacctcacaacatgtgtgtctttttgtgagggcattgggaagcaacctaggaaaacagcattgaagaattaaactataaagctacactaagtacgtgctgagtgctttaggtaagagaagcttcaagattttaaaaggtttaatgcagcacttaggtggttcataaagaaagattatgtagaggcccaccttggctcaaaatgagacctgtctcaaaaataaaacaacaaagatattaagtgaacaggtcagaccccatgtttggtgtcaaaaaactaatggtggtggattcacaccagatgttagcagtgctcatcctgggagcacacaacagagggctggtttttcttttttctttttttgtttgttttgttttgttttgttttccttctgtatttttgttgtctaatacttttataagaaaaaagtcctctggcttctaaaattccaagtatgtgtagagtttaagccctcacttattttgttgtatatgcttgtggtggtctatatggggatgcagttcccgtaaggaggagtgagcagtattctccccagatcttttactctctagtttgatgctttttgctgactgcaaatgtcctcctcagaaataccagcaagttcatggttactgtctgcagtcttaaaatgttttatttcaaaatcgagtctttctgtaatttatatctatatttaatgagatatttattttagactgccagatctctgagtgaggatttttctaatcatttcttttcctcaagtaggctataatccttcccaactcgttccgatagctgggaaccagacattaaatatatgagcccaaggggccattctcattcaaaaccaccacacatactctactttcttcctggcctagagctttgcaaatgaggactagaaatactttttattcagtcacttgagatgtggaatatgggtttatccttagagttgaaaagaaactaagggaagccccgtctactggcagaggccctcagctatagcctgagtcagggcagaggcaggcaattcaggctgccacccccactacactccatcttattttcctttcttaggagtgtgcttcctaagacatagattttgttttcaagtatatgtgtgtgaaagaagtatggtgtggccattttagaaatgctaactaaatacctaagatactgcattttcacgagcagaactaaatctggtgagttgcctgaactaaggctcagatttcagccccaggttcccatttactcacataagagctgtgacagtgtcagcttttgaggccttggttgttcttaactgcaagaaggagagcatcagcaagcttgtaagactgacaggggtaccagtgaagtctgtcccctcagggcccttacttaacagtaatcctgtttctctagaccctgaagatgcttaacagcaacacagagagcccgtatttgatgtggaacaactctacaagggcagaactgcttgagtttcttgagtcacaacaagaaaatatgatcaaaaaggtatgttaatgttttatattttcttaggtgacttattctgattgaatgagtcttgatgaagcagtgtgctattcaccaatgaaatgtttagtcaacagctctagccacctcttagctgggcatttcaaggataggctagtgttgtatgaagtcgtcctctaggggacgagggatgactcagcagctgtgagcacctactgctcctcagaggaccagatctgtattcctaaccctataagctgctcatagttcatggggggggggggggggtgtctctgatacatctgcctcaaagtcacctagactcagctgtacaaacacacacagacagacacacacatgtatttaagtctctaaaatactacattaggattttctcattgtcactacttccataaagttaacatctgtttacagtagtgatgcactgggagacctgggccctttgtcaatttatttcttgtaaacccccagtctgagtgtactgagtgtatgcacgagcacgcacacacacacacacacacacacacacacacacacacactatagtgtgactgagctgggtggccactggaggagtgagaacagcatgtcacagtcggctttctctgccagctctagttcttgcctcatctagtgttcttctgagattgaggatgaggcctggtaattagcagcagtaatgcgctctgtcactgtgcctgtcccagccatggactagcacatgtgtcctgccatgtttgctctctgaacgtcggtgcccttcttaacatattcagtgcattattagacaaagcagggtagatttaaaaactggacattaagttcttacatctaacagtcttgtttttctttctttggtttttttgtttgtttgttttgtttttttaagggtgattgtgacaaaacttatggggcagaatttgtctacagtgaacacgccaaagaacttatcgtgggtgagatttttgttagagtctataatgaagtcccaactttccagctagaggtaagttcttggcttttaattttgtctgatgtggttgatcatacctactgaggtctagtgactctttcacatttcacagattggaattaatacctcttttctggctgagttctttagaagttgtcctgggtaggtatgtaaccattaacagccgaggagcctctttatcgagatcagtgcttctcaacctgtgggtcgaaccaccttccatagggttgcatatcagatttttacattacgattcataatagcaaaattatagttgtgaacttgaaaagaaataattgtatggctgggggtcagcacaccatgaggaactgtattaaatggtggcagcattaggaaggttgaaaccatgggtcagattgttgaaaaattgagtttcacgaagcccataagcagcgacttgtttcttagctactctttttatttgggccttgaggggaaggcgagaattttgtaattgaatagcttggacagagagaagcaaatcataacatgtgtgtgtatggatgtgtgcatgcacatacgtgagataaggtcgtgctttgtggcccagactagcctagaactcaaaattctccagtctcagcccccaggtacctaagattacagacattcaccaccaagttgggtgagaaataatgctttgttttagaatttgttcttgaaattggtatttaccaaaatataatgtatattattattcacaggattaatatatatcactagctaaccaagaaagtaagttaagtggttggtaaaggccattggagagctaacccctgaatttctcttgtaactatatatactttttatattgtaaacatgtaacataattgttaaaaaaaaatcacagtatatatgctcttattagattagtaaaggggacagatactctaatcacttgtaccaagatattggtgaaagtgtgtaaaatctcaaaaaattaggtaaatttcatttggttttgtcttttcccactccttgatggagtgcggtatgcatagctgtgttcatttgtatttacagtttcatctattctgtttcttgaggtttcttttactctaaaaaccttcagcataggctcttatgatgacacatttatgtgcttggcttaggttcctaaagagtttgctgcaagtctgttggattacataggctctcaggcccagtacctccacacgttcatggccatcactcatgctgcaaaagtggagtcggagcaacatggggaccgcttaccaagagtggaaatggctttggaggctctgagaaatgtgatcaaatacaacccaggtgtgtgattttttttttccccttgattcagagccccaccattacagcagagcagccagagttccaaaacatgctcaatttgattgtggagactcaggggagatcacaccggctcttctgctccatgtgctataatggtaaagggagagacactgggggccatgtttagaagaatttgtatttaagaaagaataaactgcaataacatcatttgttagtaagaagtttcacattactggtatagattggcatatcatgtttacatgcttggatttatttattagatgatctaaatgttgcttctttgcaacacagtactatttaattatggatactcatatttttttaaaaattgcctgaagtttttgatgtgtaaaaaatgaaataataaaaagacttaagagttcttctcttgaatgtctttcaaaaggcattcaaacggttccagatcaccaccaaagcgcctgcttctggatgggtatggtgcaggttaaagctgtaaccttacttaacacatccttcatttctaactaacgccagccaagagagaccctgcacaacataaattgagttaaaatttcttcaaggtatttcatttaccttcttcagtgaatattgaagtgctattaaaatttttggctttttggcatttgccaagttttactcaaataactaaaaacaatattagaaaaattattcattcacaaggtacattaagctgtaattaaagacttttaaagcacagagagagatcattctgtattgtttgtggtttgcgcgagtcaagcaggaagcccaggacccaagctccagtcccactgggatgatctgggttaggacgtgtgctccctgcgctctcctgagtcccagtgactgtgctgccatattgacgcgtggtttgaaactgaacacaagcagcttattgaatggtttcagacttgttgtggataaaggcatctaggacctcaaaagattgcactgttttcatagccgagtggtagcaggcagcgggcttgcttaactgacaagagtgccagcaggcgtgtgggactgaagtgggtaagggtggaaacatcactgtcctctcaggagaagtccttggtgtgtgcatatcaaattgtctgttgtgttgtcttcatgtggcagagttctgttccagtcttagtaaaggctgaatgacgtcagagtctccctaaattcagttaggttggggaaaggatacgcctaaggtctagacacagctgtgcccaggccgaactttgcagatcattatcatcatcaaagcgcaagggagaaaataagtgactcatcgtcattgttaccccaccccccaaaattcaccaccaccaaggagccccgcagtgctttggctcactttacatggtgtggggctgcatttgtgtgtgtcctgaggctggtgcagcctgtggcctgtaggtgggaacgactaatagaaggaacgggtaacgctgccttattctctttaacatttgagagttgtatctgggctggttatttgaaatttttcttggttttagtttgtgactagaggtaggcatggaagcaaacccaagaaactctaatgttctgctatttacggcttaacaccctgcacagcttccagatagacgcccctcagagtttcagagacacaattcacagccaatggctgtgtttgccaaaggcctgcgattgtacctcttgtaggtaaaacaactgctgcttcttatccctaggttctgaaagtgaatgcatcgggcactttaagttaatattttctcttctccgagtccatggagctggtcaagtgcagcagctggcgttagaggtacgaagtgttttgtgctaaggaatgttgtatttcctaccacttactgtcagtggtttgagacttgattaatcattatctgaagttaatgaaaacctggatgttatattcactttggctattaggccaaaatcatgtattttttaaattgaattaatgtaactatgaatataaccttaaagagcaaatgctggacactgtcattcagggtggttctatctatagtcgttgacatgtgtcagggccgaggtatcttgtagagtgttgtgtgtggtgtgttagggacggggctttttttactctaaagtttagtagcagcagatcaacgagaggagaaggcagttccctgtcttggtgcccacagaaggacgcacgatgaccaggacacctcctgaggattgaccctaacctctctctcctcttgacctactctcttgtgtacccagcacagaatacctttcagcaaggcttgcagaccccttccttggtggagagttagggtatcacagccctgggaggtaaggctcccagagaagttgggggccctttctcaagaagaatgaaaccgttaatcccgtaggattctgtttaggttgcagctttgacaggatcaggaagccccgatcatggtagtgtttgtcccggcagctcagagtaaggtctcaaggtcatcctaagatggccctgtcattgcaacacatggtttattactgaaaacaccactttcaaccctgcaagagcgtgttcagaagtagcttttaaaaacaagcaaacacatataatgtgtcctaattacctttctcagctcatcccattcttaatagaacagttgttaagcatgtcagaaagcgttaacaagcattttctttatgttgacaacatttatatccttcagaggttttttggggggaggctggggggattcaaggcagggtttattgtgtcaccctggctgtcctggaactccctctgtggaatctccacctgcctctgtctcctcagatttgggattaaagacgtgtactgccgccacccagccatcttgtaactttttttttttgttatttattatttgcatcccaaatgttgccaccccccttccagttctccctcccagagctcttcatcccattcccatccccttcacctctgagagagtgtcccagagctcttcatcccattcccatccccttcacctctgagagagtgttcctggggcatcaggtctctacaggattaggctcatcctctcccatcgaggccagacaaggtagccctctgctacatctttaactttttaagcaaacattattaggtctgaatagtgttctgaaatgctaaaagtggttcaagtggtataggtctttagtcatatacaacagtggctagagaaagaaaaatagatcgatttctttacaatggaggttaaagcagcttgttgtattagctacaaaggatacttcctcctacagcaagagagagtcatagtgaagaccagtcctccctaactgctccccatctgtgaccacagtgcatatgggggagggcatcaacgtcagacagaaggcttcttagatgatcacattaatagccaatcttttgaaaataaactctttgaaaaattaagtgttttgtcgtccaaacatgtttgtcacttttataatttagaatcacaattatttaatgtcatgttaattaattttcaggttgtgaatatagtgacatccaaccaagactgtgtcaataacattgcagaatccatggttttgtccaacttattggctcttctacactcattgccatcgagtaagtatgtgtgcagatggcatcagacacatggcatccatgttgagttttggagtgtttgaagtagtgttcaccatgcaagatttgcctttctaattatgttttgtataagtgaatgaaattatgctgtttcccatataaaagtagaatctagggagtgaggaggtctgaaacctcaggagataacctggggggtcagactgttgagcagaggctaggtgtgaataagagcacgtgccagccagcgctccgtgctgcacttcaagtgtaagattttggatactagaaggtacgcttacggcagtgattaccttgcacttaatcctatgcccgttaccgtttatttatttagtacccatagagctatcaccaaggggattgtagaatacggcagcctggtttcctgaggacagcttgtactgatggaggctccgcgtaagcagtacagttgtccacttagtagttggtcattgtgcttgttgtagccttaaggttgccttgtgggaggtcagtgaagcttcagccatttgtagtacagctccagtcacaaaacaaacactgtgatcgattaccagtcacctttgctaacgtctgggtggtgcgtggaccttcagtctgagagttgggccttcagggatcttgcttgttgtttcttcatggtccgttcgtggaatggagttgtgtttttctttaatactgtttcttttgaataaacagcaagctaggaatagctttaaaatggtagcactcaggaggcagaagcaagtggatctctgagttctaagctagccagagttacactgtgaaatcctgtctcacaaaaaaaaaaaaaaaaaaaaaggcaagcaagagctggacgggcactgagcaactctgtgcctctcggaagaaaatcaactaaacatggacagaggagatcctaagaagccaagaggcacaatgtccttatatgcattctttgtgcaaacctgccgggaggagcacaggagagacaccagatgcttctgtcaacttctcagagctctccaagaagtgctcagagaggtggaagacatgtctgctaaagaaaaggggaaatttgaagatatggcaatagctgaaagggttcattatgaaagagaaatgaaaacctacatatccctccacccccacaaaggggagaccaaaaagaagtccaaggaccccaatgcacccaaggcctccttcggccttcttcttattctgttctgagtaccgccccaaaatcaaaggcgagcatcctgccttatccattggtgatgttgggagagatgtggaacaaccctgcagcggatgacaagcagccctatgagaagaaggctgccaagcagaagaagtatgagaaggatattgctgcctacagagctaaaggaaaacctgatgcatgagaaaaggggtggtcaaggctgaaaagagcaagaaaaagaagggagaggaagatgaggaggaagaggatgaggaagaagaaggtgaagaagaagatgatgatgatgaataagttggttcttgtacaggtttttttccttgtctataaagcatttaaccaccctgaacacaactcactccttttaaagaaaaaaattgaaatgtaaggctgtgtaagatttgtctttaaactgtacagtgtccttttttgtatagttaacacactaccaaatgtgtctttagatagccctgtcctggtggtattttcagtagccactaaccttgcctggtatagtctgggggttgtaaattggcatggaaatttaaagcaggttcttgttggtgcacagcacaaattagttatatatggggacagtagtttggcttttgttttattttttttttcttttggttttatttttggtttgggtttttttttttttcatctttagttgtcttggcagcttatgcaaagataattattctgttaagtgaataccactctgtaattgaaaaaaaaaagtggctgttttgttgacattctgaatgcttctaagtaaatacattttttttcttaaaaaaaaaacaacaacaacaaaacagcaacctttaaaaaattatgtgcagattattattgccatacctacaagtttaggtagttttttcttttctctttcaaactttgtaagacttaatgcaaaaccaagctggtaggtaaagtaaaacgccacagtttcaaaatgtaaatttaggagctggctcagcattttagagcactggttgctcttgcagaggacttgggtccccttcccaggacctacatggcagctcacaactcatagctccagtcacagggcatctgacaccctcgtctgacctctgagcaccaggcacatatgtggtacacaaacatccgtgcaggcaaaatgttaatatacataaataatttctaaaaaggcaaaataaacattttttttttgttttgtttttccgagacagggtttctctgtatagccctggctgtcctggagctcactttgtagaccaggctggcctcgaactcagaaatccacctgcctctgcctcccgagtgctgggattaaaggcatgcgccaccacgcctggctaaaataaatatttattactgcttcatttatgtagcatagcctgtactttattcttacaagttgaatatctgatatttcaatatttcggcctgttgtcactctccaaggagcattgttcttgtctgaatctcagccaaggcttgttagcgtctcctcgtagtgagtgcttcattcctttggcctcttgcctgtcattcccacttgactatgaacatccgtgcatcagtggttgaggggggcaggctgtgtccagaagtgcagctctgagttgcaggtgtttctctctcctaagacaggagaaatcttaggtgtcttaatagggtgtcctctggatgttaggaagtagtgattggggccgtgcagggaacagaggtaggaagaccgtgtagcctagtggtcatgagtgtggacctgagagggaagcagacataggtaggaaaccagctagagcaccacctcactatgagaccctgggctgggtggactgggcctcagtttgctcacagcccagctgtattgcacttgccttgctggttaacgtgagggtgaagtgtaataatgtgacacagtgacacaggctgagcctgcactcactggtgctctgtacgtgtaagctgacagttgttgcatcccttgttgtgtcttttcctctgcaggccgtcagcttgtcctggagactctttatgctttggcatcaaatacaaagataatcaaagaagccatggcaaaaggtaacgtacacggctctttctcatccgtccagctcagtcttctccagagaagtagactgcgtgaaggtggcattagaggtctaaaaactcaacagctgcctaatcagtgtgatggtcctggttcccagctacacaggctgaggcaggaggctcgtttgagccaaggactttgggtcaaaatggacaacacagtgtgaccttatcgaaagtcagagatcaaaagtgtaagaagtaatgagttgaacttacatggcaagtgaatagaggctgtgctgatgagaaagtcactcagcatttgagcattgatctttttttttctttctttcataggagctttgatttatttattggatatgttctgcaattcaacacaccctcaggttcggtcccagacagctgaactttttgccaaaatgacagcagacaaactaataggtccaaaggtaagaacaaaatatcagttaccctgctaattatttcatgacattgatttcatgtctgtgtgggatgacgaggacaggaaatgctcttctgtggaagctgagcttgctgctctgttagggaagcctgtgctaaacctcagaaggcttgagagcgtaaagagcggggagatagatgcttactacactctccaagagaaggattggcctgagctggcaagcagctcagtaggtaagattgtctgctgtgcaagcaaaaagacctggacttgaattcccagcaccttgatacaaaagacgtgcaggccctgtgtacctgttaacccagcatggaggatctggggaggagatctctacaacagatggtgtgtaggccaagccactgtcctgtcctgggcagctgaggagcatagacatagacgggaggactagggtacagtctgctgtgtgtaaatcttcagtcaactgtgtacagcaggttaggggtcaagttaaattttctgcaccggaaaggctctataacttgaagccactggttacagatgaactgatgggccattcattccactgctaaactgatggctgtattgcacacacatgagcctgtacagagctgtatcgcacacacatgagcctgtacagagctgtatcgcacacacatgagcctgtacagagctggatatgttgatcagttggttggctggtcagtctgtccattgatagtcttttgttttataacagttgctcaggctggcctgggactccctacatagatagcccaacctgccttaaactcctgtcagtcctctgacctcagcctcgtgtgtgctcgaatgacaggtgtaaggcaccatgcccagctggagtgttttcaggtttcctaactgcagggagcagagaagtaactggatggctaagtatggcagctcgtcttgttacggttacttggcattgatcaagatttatctttcctccctccccaggccttctgctcttactgatctaacctgtggcataggttgcactgttaccctgtcttagaaaacttggagtgagtcagatattgagatgttacctgtagcccttaaaactctgaacttcctcccctaggtgcggattacattgatgaaatttctgcccagcgtgttcatggatgccatgagagacaaccctgaagctgctgtgcatatatttgagggaactcacgaaaatccagagctgatctggaacgacagctccagagataaggtttccacaactgtgagagagatgatgctggagtaagtacagatgggtcccggggggcggggggcgggcggggcggggccgtgcttctgctctgcctgtccctgcagcactggttctgaaggttgctttactaaagtgtagttttcctactctcttttcccccaaggcactttaaaaatcaacgggacaaccctgatgtgaactggaaggtaaactacatttttcttttatagttttgttgtcttgttgttgtggtttttaattcctattgagtcagtttgtcagcttgtacctattagttacttgttaataagacacattggtgtgcatattggaaagccaggcttcaaacacatgtaaaaatggtaatacttaacatttgaactaaatggctaaaggcaccattataagctacattaaaaggaaatctcttaattactataattttattatagtgtctaaaacaatactaatggctatttttgtactagtttattgtatgaagatttcattaatggtcttacatttctcatttacagacaagtgataatttaagatggcttactagtgattctttctcctctctttaaagttgcctgaagactttgctgtggtgttcggagaagcagagggggagcttgctgttggaggcgttttcttgaggatctttattgcacagccagcttgggtgctgaggaaacccagagaatttcttattgcactgctagaaaaattaactgagctcctggagaagaacaatccacatgtaagcttcatcagcaaatagttgctaaatacactagttacatttccccaaaccacatcctcgctggcagggagcatcggctgcctctcactcgggtcgcagttccagggtcaggggtctgaggtggtggagtgtttatctagcatgtgcgtgctctgagcgtggtgttcagtactgcaggaaagaaagcaaaactcatgagagcagctgcgtgtgaatccacatgcacgaattggagggagggagggagggagggagggagggggaaagggagagagagagagagagagaatatatatatgtcagctcagtagtgaaacccttcagtaaagtagtatatggaacaaagttagagctgcatatattgagaaaatgctgtttcttacaactgtcgccactctaaaggtttctctacccatgcatagctgaagagaaacattaaatgttaagtttttctctgaaacggtgaaaggctttttcctggcagacataacccttgccacagaaactgtcaacagggctgtaccagtacctgggcgagtgggctgtgcctgcgctcaccaccagaggctgctaggaaaacagaagtgatgacatgggcttgggcttggtattcaggtcagtctccctgatagtattaatacacttgctaaccagatgtttagattgaaaagtacagagaccaatcattgctgaaataatcagcatagagcaggctaaattaagagcccaggctatttagttagatggttctggaccaccccagtctactgggattagctctgttgtttgttgaatctgcctcaattgctgtgtgcagttttacctacccataaggctgaggttgtaatgagttaatgtgcatggactacctgtcttaacgtctgccacatttaaatccttggaaattgtaactatcgttagcttggtgaaaaaaattaaaaataaaattgtaagtggagctaagagattgctctgcagtttagagcccttgcttctcttgcagagggcctggtgatcccattcctctctggcctctgcagggactgcacacatgatacatgtgatatacaaacatacatgcagacaaagcgctcatatacacaaatcagctcaaaaataggagtagtgtgccaaatatttgcctgtgtttctctgatgctaatagttttgctgtcacatgatttcttgtagcataaaaccctcagcaccaagtatgtagctcggttgtaaaacacttagtattcggaaggcctgtgctcagtccccagtctctaagtgacagaggggagaggggagatccccagaagctaaaatagggaacacacataagaatgttctcatgtgtcacctctctttgtaggccatattctgatttctgtgttcttttctgaagcatttgtgtgtgtgtgtgagagtgtgtgtgtgtgtgtgtgtgtgtgtgtgtgtgtgtgtgtgtgtgtgtataaaatagtatgaagtgtatgtctttgaaagccatgatctccaatcaggagatctactacagtggtagctagatctattaaacataggtcaagtgtttttattctgaaagtagaaagtcttaggtactctaaaatcaaagcccttaagtttcccaatgatctccgaagccaggtagtaatgtctgtgtaagtattctaaggtctaagacggttctgggttggagcatttcaggtaaggggttattggcatgtgataggaatttgcatagagcttggagaaacagcagctacttctgcatcctcttggattcttgctgcagtatctcagtagcatgtgtggagcccggtcttaaacttcacatagccatttaggagtgatcttttacctctgccataagaacacaggctacctggcccagagagggcttcttagaatgcagtggcacgttcctaggtccttaggtttgtgctttttatcaaagaaaaagaaagtttgctgctctcttaggatgtgtgagttggatttcaggtgttggcacttagaattttttaatctctagttttgaacaaatgtattaaggcaatttaagaatttttttcagtgctatatgtatgatttattggctctgatttttgttattgttcttcttcccagggagaaactctggaaacactgaccatggcgacggtctgtctcttcagtgcacagcctcagttggcagatcaagtcccgccattgggccatcttcccaaagttatccaggcgatgaatcacagaaacaatgccattcctaagagtgcaattcgggttattcacgtcctgtctgacaatgaggtattgatgtgagtctgctaggagcctagagctccacagtttatgtgctctctcggtgcacttcagagtctaagaccccattctactctaagtttctctctcagtttcagtgggatgattagcagagatggaacttaattctctcataagtaggatttaaactgcattttgttcctgtagaacttacattgctctgtataatagtctgctctacaagtgtccttgtctttcgtgctcttagctgtgtgtccgagccatggcgtccttggagaccattggcccactgatgaatggaatgcgaaagcgagcagatactgtgggcctggcctgtgaagccatcaaccgcatgttccagaaggagcagagtgagctggtagcgcaggtgagtgactctgtgaacagtgtcaggaagacagacataccagacggacagacgttctgtatgggaggtcttaggacttggtggacgctccgttacagtttattcacgcagaaaggttaaaggctcaccaacttcctttcttctctgtttttgcattcactcttagcttctttgtaaaaattacttcattctctttgggttctgttcattcattccttgtttctttggactcatattgagccaaagaagtcctcatctagtagaaatcagacagtgtacacagacattgaagggagtcaggcaaaaggagctttcttactctgggcacaaataccacatagcctcactgtgtggccaccacgcttctggaagcagaggatatggttagctatgtgaggccagggtgagacagaggacagtgttggtcacaggtagaaagctttagtttatgggtctgttgctctatggcaacggcagcagagagtgagccacatattgccaaaaccactaggggtacatttaggtgtcctcaccataataaaagatagctgaaagcgtagttttgctaattagcttggtatactcattctccttgtacagatacaccttcacatcacttttcctcttcagcctttgacagcaaaccctgccaggtgacagagtgacatctgctgcccttaaactggagactaacccccacttctgtatgtaggactctacttcccctgatctcttctccaacttctcccccaaccctgccctccaccctctgtaaacaggaaaggtactaagtgggtgtagatgtgaggtgactggtgtgagctagtctgctgctgaggctctggtcacaggcctgagcactgactgcactctgcccaccctactcatcaacgtcagctcctctctctgtacacaccacatttactcccacctcgctggattctgagaatgttgggtgacaccgtgttgttatttagctcttaacaggctgataactccgtggtgactgcagagagtgttgtaagaggattcaaaggtcgtagagttcttcagaggctgctgtctgtttagagtgacgccattagtgcaggcagccctactgccgtggcttaaagcctgacttctgtccctcctgggtccagatgaaggttctcttacacccagctttgcagtgtacatctgttttccctgtgtgcactgattttcttatctgaaataataattgtgctttattcagtgttgggaagattatataatgcatagcattagaacagttggtagaactgaataaaaattactttatatacgaatgctgcttctacccgggcggtggtggcacacacctttaatcctagcacttgagaggcagaggcaggcggatttctggttcgaggccagcctggtctacagaatgagttccacgactgccagctacacagagaaaccctgtctcggaaaaaaacaacaacaacaacaaaaaaaaaaaaaaagaatgctgtttctatttaatactagaataaaaaatctgcatctgcattgaaacgctaagaacaggctgccctgctgaggatacgctcttcatggtgaaattacatctttggtagctgacatacatattgtgctcatatgaatgctgactgttccttccaggcattgaaagcagagttggtcccatacctcttaaagctgcttgaaggcgtaggccttgaaaacctcgacagtcctgctgccaccaaggcccagattgtcaaagctcttaaggcaatgactcgaagtctgcagtatggagaacaggtgagtctgtcttcaagaagcaccattgtgctcctgactacgaaggatcttcaagtcaggagctggctgtcagcgagctaagaacctgcatttaagtcactcgtggggtggctagtgttagttttgcataactgcttcacagctgcaagaagtcacaatcttgtccccaaaagacttgcagggggattctctttctgcatggtgacagtatgttctgcattccaagaagaaaacaagtagaagtcttagcatggaagaatttgaaacacttagtgtagaatcaagtaccatttaaaagacctgagcatccttttaaatgtttttattagtggtcataaagtgctagtttcttttcctttacagaactgctgtgctaatgtttcagctgcacgtgtgatttcaggcctctgaaggattcacttttcatcttcacttttaattgatttcattctaacaagggtatgtgtgtgcacatgcttgcacaagtacatatgtggcaggactcacttctggagcgccaaggacagtttgcaggggtctgctctcccttaccccgtatgaccctgaagactgaattcaggctgtcaagcttagcagaaggcgcctccagccactgagcatctctccagcccctctgcatcctcttctctgaagtgatgtctgcactttcctttcccgttgctttaataaactactttgacagctttagggagaaaggctactctggctcatgtttggagtccattgtggctgagaatctgggtgccaggagcttgaaacagatgggcacattgtatccacagtcagggaacagcagcaaatcagtctctcctgcttcagcccaagatccctccaggcagaggtccttccacatcacttaagccatcccaagcagctttccacagacaggacctggagcccatctccaggctgaatctaaattctttggaatcttaaatgtacattgaaatcaacaattaacactaaccactacaactccaatacttgtcaccttgctgcaaatacatcatttttaagccataatcttccactgtttgtcctcggagagttatgacaatgttattatctgaaatacactcagtccaatttcttaaaagtccccatggttatgagcagtctaaagtgccttatctgtatgtttctataaaggtaaaaatcaagttatatgcatataatggcacaaacaagagcacccgggcttagcaagtatgatcagatcaaagcaagatcaaattacagatagtgaacaagaaagcccagctccattacaacctcagaggctggtaataagatgctctgtcctccaaagagctctgctgcttcacctcctctattcctgcaacttttcttatggatccagggctccactgcatcttaagctctgtccttgcagcctcatacagtggcttcccagggacacccacctaagaaccttgtttgtctgtaggtgctctaataacctccttaaaccttgttttctttcatgtctttaaaatcagtcctacatggatgatattgcgaggctctgccaccagcccaggagggtccctgcccaaggagcacactgcatctgctctgtgcggtgactgagggacacttgcgggcgttgttcttgaggaacaggaagccatccggtgttctttccttaagtgaatctggagcaccacaagacacacctctgaggggagggattttgcccagggacatgttttctgttgtcctggtgcagcatgggaaatgtctttttagtggttctaacctcttcagcatcagcctgaatgctctcctgtttggaaatttcctttgccatatgacttcacccaagttctcagaacatgggcagaatgattaggccagagtcttggacaaaacatcacacaaatgcccccagcccagctcctgacaaagtccttgttcttttcagaaagctcatgagctgggccctgactcactaatctctctctgcattcttatcttccgtgtcccaccagagtatcccactatgctctctcttcaggagtcaagggttttctaatccatacttccaaactcttcaggttcctcctgcaagccatttccaaagcttccacatgttcagagcagattttcctacttcaattaagacaatttagacagtccccatagtcatacccaagttcttctagatcagcagttcttagcaaccccaaccataaatgtattttataattttgctactgagcagagtcttgagttcctgggaccactggaaataggtgttttccagtggttgccatccccaggttgagaaccactagtctagattgttttaagttgataagtggtagctgtcactcataacatgaggtcaactatagtgaacaattaaatggccttcccacctcagcagcactgtgataaggccaccctgccttgctcccaggcacagggattacccgtgacagtttcactctttatcccacagccactactctgtcttctgaatatggctctgttccacatgtttcattttaacattgggagttgtccctgttgtgggatgtattcaaatgtttcatttctttatttaagtttttcattgtatatataattgctacttttttttttcccattaatcccggttggggacatttctgtgtgtaaatgttctttttatgcttagtttactgaacgttcccttagtgaaattaggcttctgtgtctcaagaaaagacattttttttatgcctctggctttctcttagtattagaatcatttaaaatgacactaaagaagacaggtggcagatgttgcttcagtccttcgctgatgtccgggtgttctgcacagcaagtgaggctccctgggccctgcttgtcttcccctgacctgcattgccatgtctaggaatgaaatcagccaagtggccctgacacccaccctctactttaaaggggaacaaatggacagtggcttctaaagcctcagttccctgtgcgccccgcctcctgcccaggctggaatgctgccaccaggatgcagatgcacgaagagctgtgctgcagtgcgcacacctgactaacagacggacagacagacaggcagactttggattgtgtcctctgggtctgcacctacttcaaccctgaaagcctcttcagttggtgttttctatacttttactctccgtctcagtcttgtacacattcacacacacaaacacatatgcccattttctatgtgatactctgatgttttgtctattcactcactttctcatgtgtgttgttcatgatctcctcaaagacacagcccatcctttgaaagaaaggctgattgaaggtaactccagttttcagcatcttccctccagcccttcctaggtctggctcaatgagatgtgccctgcacagtgcctgggactcagtgtgtgatggacaccaggtcctggctctttccccgtggctttctggctttggaagttgtatttcctgcttggctcagtgttttcatgacgagtccctatcgttctcatgctgagtcccggctgcttttcttctccaggtgagtgaaatcctctctcggtcttcagtctggagtgccttcaaagaccagaaacatgacttgttcatttctgactcccaaacagcaggatacctcacaggtaagtcagaccttacgacacctcacagcctcacaaaggccctcttcctgccctgagcagacttacagtaacattcctgccatcacctgccatgagtgcgagtgccctgagcaggtcctaagctcggttggggtgcggtgttgagtgtttgttagaaaccatcggttagatgtgcagtatgtctgtgcttacgtgtttaattggaatatgaaaagaatgtctgtatctgaaacctggttgcctcatcccctctcgggctagacagagaggtttcaaataattgtgtatagaattttttcctaaatgttttctgtgcagttttgctaagtgtctttcccatggggagaatatgtcagtgctggtacgaataagactgctgagggctcagaagacactgcatggtgctcaggacatgtgctcattcgatacacaagctgcctggtcatttaaaaccatccccttcatcactcactttggtctgaaaagaagcagtattaagttgctgtgctaaaggcacataccatctcttagaaagaccttcagtgtgaacttagcctaatgagttacgaggtaactcatcacctgcctgaaatgatagcataagtagatagcagccccaagggatttttctacccagagctcaccgggactcttcagatagagataaagagaaaaatgttaacagccagttttccccacatagctccattgtttcgataatcttgattgttctcatagaagtctataagaatcataaagatttgattctcagattttcagatccagtcgatttggaaaatggctcacctcttttcatttcctgcttagctgggacactactgtttccccctccttgtgaccacgttagtcacctcatgacttggactgagccctaaatcataagcctctggttgtgtccgtctgttttccatggagaggtccccagagggtggtgttggtctgcccgccgcctgcctctctcaagtcaaactgtatgtctaagtaggagtgtattccccacccccacccccacccccacccccagaggcctccagcgagcttctcaaggttggcagtccacgtctcccagcagtgctctcagtgtcagtgtggcacaggtcggaaatggcctgggctctcagctgaggatgaagctgctgccgcagcggtgctgtgtgggtcgaaggcgtctccgcagaagctacgtgaggcttcctagtccctgtacacccagccttcatcaagtaaatggtgtccctgaccccgcctctttagctgggtctgtgcttagagcagatgggatttctcttcgagacctggacctgctgtggtcctggagttgggagcagagtgcaagaagagagatgtgtcctgtctgtgccttttctttcacccacatccctggatgcgtgaggcctctaggaagcagcagtgatagctgtaggaggttgacacacgtctgcacaggcacagccaagtagcagtgctataaccccaccctcatcttcagaaagggctggaacttgtgtgttgtgtgacgcccgtgagcaggttcatactggacaggctgggctctgagccatgcttgccttaggtctgctccattcctggcacctcatccaccggactggaatgttctcttttgagatgttagttacttagattttcccactaattgtattctactcctttgaaggaattacctacttgtgcttcaagggttcagcttctgcgttgcctggcagttgagggacgcctcctcaccgcctgtgctaccaagtgcttttgatatgtttaatcagaatgtaattaaaacccaatctttgctgggtggtagtggcgcatgcctttaattcaagtactcaggaggcagaggcaggcggatctctgagtttgaggccagcctggcctacagagtgagttccgggatagctagggctacaaatcctgtctcaaaatataacaacaacaacaacaataataataccaccaccaccatcccctcagccatgtctgcctcattcctctaacgcctcacatgtggacagtgttcttgtgagcgagccctagaactttggctcttttcccacatatccctggaggctataactgctgtgtctgcttctgagatacaagctgttcttctcaacccaaggaaaccattaggaaccagaggcacaacactgagagcatctcagacttgctgggactcaagttcactttccctgggaacaagggatgggagtagaactagacagctggcttctttgtcagctcatcatttatacctttgattatagtctaggagctccgaatttgttcttcagttcagaatgcccttcgtgtctgcgtagttttccctgtgtaagatagttaagtttaggaaacatgagtaagctactgtaaagttttatttgtatgactatggtgatcaacaagtatcactttatttatcagtaccataaccctgtgagtttgcccaagactctgcagtgacttcagcgttgcctactttaatatgtagcattcagggtttggtgccataacctcctatttttataagaatcattgagcccgtgtcttggtttcttttttctatcaccatgaaaaaaataccctgtcaaaagcaacttaaaggagaaagggtttggattagctgttgaaggcatagttcatcatggtggagaagtcaaggcagcgggggcctgaagcagcagctggtcacattatatacacacccagtgaacagaaggaggtgaatgtgtgcatgctagtgctcagctcctttcctcaatgtcatatcattcagattcctgctgagggaatggtgccacccacagtggacaggtcctccatcccaattaacataattgagacagtcccccacaagcatgctcagaggttcctctgtgaggggacagttctaaccatcactgcccacagtctgaattgtttaggaaccacacccctctgtagtgtttgtggttttgctcatctggacctgtctaaagttgagagcagtgaagtgctttggctctgagctacactgatggaccagtctttttcctgagcaatctgtgggaggcctggtttgctgattagcagaaggtaagagttgatagtgtaggatcccaagacctaaagaagggaaaatccttttagtaagtgttaaaagtacttgactctaaggacccaggcactctggttagcttcagtcccagctcatgcaggcagtcactgtggcctcgccagcactggcacagtgtgtggcagccatttcccatccggagtcagtgctcagaagctgagagatgagatggaagtgaattatgacctctgtcctccatcagtcctgttgccttccccgcatcagatcgctctgctgtgtgcacgtcctcacgactcccttgctgcttacatttcttttctccccccaggtgtctctccttcccttctaactggcagcagcccccttcacctcaggagtgggctttagaactgctctgccaggcagcttgctaacttctgtgtagctctctgaagcaggtagagaaaccttttgctcaatgcatgttgctcgcaccacctttcctgtcccgacccttagtgtacacctttgccatgtttcctctgactcagctaagcactgcctctgcagcgctaaaccagtttctcttgcaagcgcttgctgcattgtgtggtgcttctgagatgaaagcaactgtctgtggtgcccagagtcagctccagaagccagagcccaggggctgctgacaagcttgcttccgagtgccaccttttcacgccatagagactttcagtcacaacacgtggagactacgactaaaatgctactgtctcctctggagcatgctttgacctacgagaagagtgtccagagccttcctcttcaaagagaccttatgtagtgagcgagctgtgttccctgggtgccgcttactaaagtgacctcctttgtaccaagtgaacacaggctacctagaatgtccgtctcggaagctgctagtgtcgagaatccagttgtgcatcactttgagatgggctgagcggggtggggagggcgtcttccgtctgtctgttcccatgttttctttaagtaccctcgatttttttttttttttttgtaaaattaaactttccaggtgtgaaaagaggggaaatcccctatttctacaccagtgttactgcatgaattttaaaattattctaattgtgtcaaatactaaaagccatgaacataggtgctgtatcgctgcctgttgagacagttacacatgtagatcgtatttagagcttcccagtggtctgtactgggtgctggtccctgagactgatagaaaaaatgcctgctttcctttctctcttgcaggacctggagttgctggctaccttacagcaggtacatcctcatcagccatgtctaatctgccgcctcccgtagaccatgaggcaggagaccttggctatcagacttgaagcactcagacagtaaatgctggaaggccagtactgcgcccacattcctccaaccaacatgttgaaacagactccgctgcctttctcctggtttcatgacagtgttattcctttttctataaatagacttttatttaggagaagagtccatgattctgacgtatcacgttctgagaaagcactctgtgggtcagccacctgggtacacaagaatttcttcttcttgatgtatgtaagcacattttgttcctttatatctgtttacaagactgtgaatcaaaaagacaaactttcttcctagtttttataacttttttttgaattactgtgactgtgggattaagctgcagtctacaaacattgggctaaatcttatcccagagcagggcgcctctctctcctgcaccaggtctccatgaccgtcttcctctcatcgtccctccacccgtgaccagatcctcaatcattaactctgagagctcggtgcacatcggtgtgtatgacaggcgtcaccaaactgaacgacaaggagcttgtgcaaaaaaattaaaactaaaaatggatgtgaagatgttatgtaagagattagtgtaattgtgaaatgttctatacattatcaaatatataaagctttctatattgaatgtacattatacagatcattcatatgtgtacataaaattttaaaaataaagggaattgactgctttgttaatgagatatgtatgttctgtaattttagcctttggaaacttcttccatgttcacttttgggggagatggaacagaagcagacaaacacccctcaccctcacacgcacagctgtgcccacctccgttcactcactggaaacagcagcttagttacttcttaaatcgtgtttaggtgtgagctaaggaatgctgccagagtctcacggtctaatgtttcaggcgggaggtaaggaaccagcaaatatatctaataacagatcctaatgcataggtcttccagttagactgcagactacagaaaataaacatggaaagtcacgcaaacacttgtccatatccttttttgttttggtttggtttgagacaaggtcacctcattgtgacacaggctctcctcgagcttgaaatcccatgtgtgctcgctgagagagcttgagtttccgtctgagggtagaaactgtccaaagttggaaggggccgcaggctggccattggcattcaggtctgatagtggtttgagaaagatctgagcaggcattgcataccctattgacaatcaaacgctcaaggccatttgcacaccctgactggggctctagctccatggtagaatgctgacttaagatgtgtgaggccctcagttcactttccagcactgcaaaaaattaatatggagcaatatctaacaggccatttgaaaaaccacatggaaactactataaagcttcatgtatatgtgtgtacatacatatatacatacatgcataatacatgcatacacacatacatacatacacacacacgaaaacaactaataataagggagataaagccacacctagatatttatgtcaccaagtaaaacctccagtgccaggaatgggttctatcttgttgagttgttggtcaaaggagccccacaaaaacccccaaacatcacaggctatttattggttgttctccacaatgtgatggtaaagtccaatagcagaagacatttacttatgtgatagaacatggagacgttgggctggtggcacacactgactagtgttcatggggcctgaaggtgctctgcacactactagaggagcagggaaaccatcagtattacccagatacaaaccccaggaccgacaacagagacctgcctaccagatacactggagcaatagtgttgcagaacaagtgttatggaagtgaccaacctatttggattgtgtttaaacccagtccatggtcaagaacctgacactagagaggtcacagccccttggtgggtggggtcggagcctaaaggagcacagcaatgagatggctctgaatgtcgcaccccaatacccataaatcagcgcctcactcaggcctcctcagagaagctccttgtagtagacgggaattaacacagctggcccggatgcagagagagactttagagaactttgtcctgaatggatctctttatcaaaccctacccatcaagtctcagggatatttatggaagagaggcagaagattctaagagctagaggggatggatgaccccaagaaaatggtgtcttctagacaaacaggactgacgcccgtgtgaatttacagagattgtggtggcacacacaaggcctatgcagggtcaagtcagacaggctccccaccacacagggtgtcacccctaaccaagcagttagtggagcacactctagggcaggccccatgagtagttggccaacacaaagcaaactcagtggtattcttggggagtttttgtttaattttactgggttggttggttggggcacattttgttctaattagtcttttttgttttttgtttgtttctcgtggggtttgttttgtttttcaataaaaagaaagttgggtggatagggaaatgggaaggatctgacagctgttgagggagatgtaaaaacaatatactgttgaaaaaattgaggaaaaagagatcagcggtgggtacaatcaatttgctgtattgcagagcagatggcagcacttacaagacacaccagggtgtgcacaggcctttggggcagcagagcaaaaacaccaggattactcagagacatggctctgaacatgaggactcacaccgaagccaaccataagtgtaaaacaggaaactgcagtgttagcacttggggactggcattagagaaaaaacagacctaacttggagttgaactcttttttgagttttttggagggggtgcatggcctcgtagaaagttggcccaccttatctagggtttcagtcatttggaatcagctgtgaccctgacatgctaaatggaaaagtgggcacgccagttctgaattccatgcctttctgagctacttggtgtgctaccatagggattgcttttcttgtctcgctgacaaaatacctcaccaaagcatttacagaagggtttgtcttggcaaagcatttgagggcacaagttgcattgtgtccaaaatcagggacagagagcaagaagtgctggcgctcactttaatcttttttacgtgctctggaatcccagtccgtggaataatccctcccacggtccctttaggccttcccattttacttaatctagaaaaaaatcccacccaggcctgtcctctttggccatttctagatcctgtcaagttaataaaaatgaagtctcctacataatagagtttcataacccctactctgtcctacacatgaatgggattcatatctcagctagagtacccacccactagctaaaccatacctgtctcattaatcacatgactattgaagtattacagagcttccccatccacctacccacccgcccatccacccaagcatattagcaatggtgcagacaattagtatatgccatagaagctaaaaagaacttcctctaagtcagtggttctcagccttcctcatgctgtgaccctttaatacagtttctcatgtaatggccctaaccttaaaatattttgtttctattttgtaacagtagtcttgctactgtcttgaatggtaatgtaaatatctgatatgcgggatatatgatatgcaagccctgtgagaggattgtttgacccccaatagggtcttgaaccacaagttaagaaccactgctcgctgggcgtggtggcgcatgcctttaatcccagcactcgggaggcagaggcaggcggatttctgagtttgaggccagcctgatctacaaagtgagttccaggacagccagggctatacagagaaaccctgtctcaaaaaaaaaaaaaaaaaaaaaaaaagaaccactgctctaactgaaaagataaaacagtacaacattttgtgagagaccatattcacataacttttatcacagcacaatattataattctatattaatcttacttgcctaatccataagcttctaaaaatgtgtttatacaatgtaggacaccatcacatccaccccatagggaatggtgttgcccacagtgggctgaaacttcccacattgattaacttaagacaatgcccagacaggtccacaagtcaacctgacttaagacaattccttattgaaactccctcccaaggtgattctagagttgacacttctccaggtcctttgcattccccctgtgtttattaagtgtgttaataattattaagtgtgggggctggagagatggctcagtgggtaagagcactaactgctcttccaaaggtcctgagttcaaatcccagcaaccacatggtggctcacaaccatccataatgagatccgacgccctcttctggtgtgtctgaagacagctacagtgtacttatgtataataaataaatacatttaaaaaataataattattaagtgtgtttgttaataattactccacatagaaaacaacttcacctttggactagcaggcggctactatgatttagagacagagagggagatcacagcactgtggaatttggaggccctgaataaaggaagtggggttgggaagttaaaaacatttttactgtcaaacatggaagaagatctatacatcgccattgtttgtaattataagagaaaagggaggttccagaactttgatgaaaggtctggttacagaaaagtctggacacatttttcacgttgctaaggccctgagtttctatcacagttatgtggttattgcatgcatgagttttcggtaatttggggtagcatacgtaaagtgtatttccggcaaagaacattgcctcactctctggctgctgaacagagagaaagaggagcctttgcacacttggagttggttggtttttgtttgtttgtttcagagaatggtttatgaagatgtggtttgagtcaggggaggaatgagtcgtttgcctcctgaggcaaaggtcaaatggaagtaattctacaaatacttagctttgcctaaattcaggaaagtcacttccattagagtttttgctcagacactagtcatacgttattttatgtgatttacaagcccccttttcttacacatctctcaggtttatcagcatcccaaggcaagaagtggaatgagttcttagctgtatcaaacttaagaccgagcttaaacctgtcttgtgagtccttgggaggatcgaggtgaggtcagagttccgagcaatggagctggaagcagaagccattatcggtagatagaggactgacagccacacccttcctgcatcagggactttcctaagggcgggatggaacatctttgcagtaaggccctggtgtgagtgctgacaggtgtattcctccagcctgagagcaggaatgtgatgggggaggggggatgcaaacaggaaagagaccactgggatggggtttgggggggggaggggcagtgaaggaagagcaacacgtcgaaaacataatctgtcagtcaaagcatttgtatcctccagacaacagtttgccactttgggaagcagaattctattgttctgaatgttaaaatcaagctttataatatttaaatgtatttttatttatgtgagtgtgtgtatatgtgtgtgtacacttgagcgtgtgtgacactcaaatagagatcatagggaactttcacttgattctctccttccaccatgtgggcccccaggatcaaactcagacaaccaagcttggtggcagtcaccttcacctgctgagccacctcactggcctaagcatatactttttttgggggggggtggggggttgagacagggtttctgtgtagccctggctgttctggaactcactctgtagaccaggctggtcttgaactcagacatccgcctgcctctgcctcccaagtgctgggattaaaggcgtgtgccaccactgcctggctgagcatatacattttaaagagcaggaaaaccagcaaaagatcgaatagccaatattgagaggtaagttgagtaggctaagaagcagagtgagaaaacctcacagaaccaggcgtgatagcatgcactgtcattcatccagacctttggagactggaccaggagtagccggtttacgagtttcaggctagcgtgggccctagtgagaaacggtctaaaaacaaaacaggactgggaagatggctccgtaggtagagtgcccactgctcaagcacagagatagaagttcagggctctagagcccacagaaaaagccatgggtccatgcccatgagtgtatagattgggctccggttgttgtttttgatttggaaggggatatgcaaggtccagaaggaggtgaggggtaaatatggttaaatatatttatgcataaaactctcaaaggatagataaaaattctgaatctaaaaaacaaggacaagaatggcagatggctcctggagccttagcataggggtaccagagacaggcagatccctgacgctcacgggccacggggtgctatcaaattgatgagcttccaggttagtcagaaactcttgtctcaacaagttaaactatagagcataaaagacagcacccacatgcatgtgcacctgcagatgcatctacacacacaagaccacatatatacacagccacaacacacgcacacaacacacacacacagtgcttgaggggcaataccaaaaagagagatatcgaaataagagacaagttaaacagaagctcagctcaggatgccctcaagcaaataaataaataaataaataaataaataaataaataaataaataaataaataaataaataacaggggtaaaaggcaaaaccattgaacacattcccagaaggaaggaaatacccagcctagtggagaatggcgaatcgtcacaaatgtacatcacttaatgtgggaacaagaagggcctcaaagcgtttggagagttccaggcacaaaggagaacgttttcaaaaaaggagagagcatctggtgagcactgtgtgctcaatgatggtacaagctaggaggtgaggggtcataggaggtgaggggtcataggagatgagggggtcataggaggtgagggtcataggaggttaggggtcataggtgagggggtcataggagatgagggggtcataggaggtgaggggtcataggagatgagggggtcataggaggtgagggtcataggaggttaggggtcataggtgagggggtcataggagatgaggggtcataggaggtgagggtcataggtgaggggtcataaggaggtgaggaggtgataccttcagagttctaaggccaagactccgtccaaagtacgtagttctaattcctttcacttgagagcccaagagctacccgagacaggggagggcagcgctcctgttggtcaccctgagtacttcacctgagtagctgtttcagctgcaaacttcagtttgacactggttgccattgctgtttggtgaacactttaaaggtttggattttggcaacacattgtacctaacggttaaattaatttggccgtgacacataaatgttactctagtgattttagatcaagaacactgtccacaggctattctgatgttcagtatttccggccactcagatggctactgagtggacaatggaccaggtgtgtttcagggcattgagtgcccctggtggtcatatggagaatggcacactcacctactgcttctctccattgcctgcagaggatgggaggttctgagacctccctggggaggaatggggaaaagctgatgggaaaggggaaagagttgctgctctgtgctctaggacgatggctggttgtgactgaagctgagggagcagtacatgtgaacagaggaatccaaggaccaacagccccaggacggttttagttcaactgaaaggacaagggacatccaccctcttcagggcattgaactgtggtcagaatggccctgagtaagaaaggaatgggaactgctcaggatcttagaccaggtcctgaaatcctgaggactggaagaagacagatttcaggggaaatcagtccttcagtggcttaccctggccactttgatctgctccagcattctgcacctaactgtggccccagcctttgtggtagggtccttgagacaagtggatccagatgggctatagggcaggggcatttacatctaccacagcagagaagctcgtgcacatgaaagattgactgctgtcccagatctgtgagacacggggtacctcatccaagtcccaagggacaaatgcaaggactcatgagagttaccacctacagttatgtgtccaagcctgaactctgagcatgtgcaaccacatatagttcctgtgtgtatgtgtgtgtgtgtgttgtgtgtatgtgtgtatatgtgtatatatgtttgtattgtatgtatgtgtatatgtgtatattgtatttttgtgtgtatgtgttatgaatgtatgtgtgtgaattgtgtgtatgtgtgtgtgtatgtgttatgaaactatgtgtgtgcgttatgtatatgtgtgtgtgttgtgtgtatatgtgtatgtgtaatgaatgtatgtgtgtgcattgtgtgtgtgtgttttactctgcactagagattggagcgcaagtcctcgtgcttgcagggcaagggctcttaaccaccacaccatctccccggctctctgtgtatcctttagctgttctgttacacctcgaggtctctaccacagcctccatcttcagaagcccagacattgcctgtacttgtgtaaaccctcacctgggaggccaacagtaatgaacagagtcaggtgaatcccaaaagctccttggcttcacagccccatcgaaatgtctagcttagcgttccgtgagaaactgtctcaaggcaacatggccaagatgtctcagagaaagcagcagccttggcctctgcgtgtgcttacacccacatagtcaacactctgtgtccatggaaaacgcacgcacgcgcgtgcgcgcgcgcacacacacacacacacacacacacacacacacacacacacactgttttagttacagagagaataaaagtaaatctataaggaaggtgctgagcctcacaggaagaagccgccatccctccctccctctgctgggcgttgatacccagtgtaaacaaagccctggctgacccaccttcctaccctttgcctcatcttctgttccaggacgaggcagtcagacacgtccccctccccttacctatcaccatttccacttgcagaagtgctgcgataacagggatttaagaggtcaggccagaggaagacctcgagccagacagtggagaaactctcagctctgccagtctttttccaagctggggaccaagtttccaagtgtgagactattccacccatcaccccacaaaagccctcaccttgatcggtctctgtctccatgtgttccagtagaagcagcagacaataggagctccaggccccagtggctcgggtcccagtttgccttgaagctttcacctttgttacctgaagtccccaagtaacaggtcatgaatacgaatatccctacactaggagggccaaccactgatttgtagtgttgtcagccatgatcgtggaaccatctatgatggtggatgggacctttccctggatagttctgggacttctgcatgtgcggttgcaggcttaaggctgtggagaccttaccatagtttcccataatgaggacaggtagcactgggttagcttgaagtgtaataccccaaattatcctgtaacccacctaaccaagggccaggtaacatcccagaatgttgggaattatagttcttgaaaaagtaacaaagcctcatgggaaagtacgatggcctataggtttgtccttataaactcttgcaacgcatggtttggggccattccagctatgaaattccagggaatagtcttaattaaagtccatctcttggacagtatttaatatttaataataaatcttgctttatgtttggcccagaatattggaattccccccccccctctctggtgaatgtcaggattaacagaagctgctagcctggagttatttgtgggacaggtactttggtcatcagcaagcataattccaaggacatgagtccaatgggagacctttcctatgggctgttttagacacagatcatagtctggatattgcctgatgggctttgcaggtacttccagcccaaagcaaagaactggatcagagacacttggttgaaatgatgacagcttattatggaaagggaagcattccagcgaatgggagcgattgtactctctggaaaaagcccaaagcactaggcctggagccacagggccattgataggtcatttaccagccgcccacctctcctatgtttggatccccccacaggtttttcttgtggatgctctgagccgtgtttgcagctctggtggaggagatttatcagtctctctgtcaattggcttttttttttttaagatttatttatttttttatatgtaagtacactgtagctgtcctcagacacaccagaagagggcgccagatctcattacggatggttgtaagctaccatgtggttgctgggatttgaactctgggccttcgaaagatcagtcgggtgctcttacccactgagccatctcaccagcccccacctggcttattttatttgttaatcttttattgtattctatttatatgtgtgcatgtgtgttcttgtgccacagtgtgtgtgtggtggtcaaagacaattaatgggagcctgttgtaattatttaatctcagatcagggtttctaccccaccttaaatcattcagttcccaccttaaatcattttatgattctgt

SEQ ID NO: 2425 - DNA, 7965 bp, Mus musculus
ttagggttcagcgctcgcaagcctggtggaagatgggcggcgtccagggcgagcctctgagaggcaaagggaggagcggaggggtgggggccgcggcgcaggaacccgcggcgacaggccccggcggggaaaaggaaagcgagaggggacggggccggcggcgcctccatcctactcaagacgaggtttcagcacaaaatgaacataattagggaaaataaggatctggcatgtttctacacaaccaagcactcatggaggggaaagtataaacgagtcttttcagttggaacccatgcagttactacctataatcccaataccttagaagtaacaaatcagtggccttatggagacatttgtagcatcagccctgttgggaaaggacaaggaacagagttcaacctcacatttcgtaaaggcagtgggaagaagtcagaaacgttgaagttttctacagagcacagaacagagctgcttacggaggctttgagatttagaactgactttgcagagggaaaaatcacaggaaggagatataactgctacaagcatcactggagcgatgcaaagaaacctgtggttttggaagtaactcctggaggctttgaccaaataaatcctgtaaccaacagagtgctgtgttcctatgactacaggaatattgaaggcttcgtagatctctctgattatcagggaggattttgtatactctatggaggatttagtagattgcatttattttcgtcagagcaaagagaagagatcattaaaagtgcaatagaacacgctggcaactacataggtatctccctgcggatcaggaaagagccactggaatttgagcaatatttgaatcttcgttttgggaaatacagcactgatgaatctatcacatctttggcagagtttgtggtccaaaaaatatctcctcgacattcggaacctgtgaaaagagttctggcggtcacagaaacatgcttagtggagcgagatccagcaacctacaacattgcaacattgaagcccctgggagaagtatttgcattggtttgtgactcagaaaacccacaactttttaccattgagtttataaaagggcaagttcggaaatactcttcaacagaaagagattccttgttagcaagcttgctggatggagtaagagcctctggtaacagagatgtttgtgttaagatggcaccgacccacaaaggccagcgatgggggttactcagcatgcctatagacgaggaagtcgagagccttcacctcagattcctggctgcacctcctaatggcaactttgcagatgctgtattcaggttcaacgctaacatttcctacagtggagtgctgcatgcagtaacacaggatggtctcttctcagaaaacaaggaaaagctaatcaataatgcaataacagcactgttgtctcaagagggggatgttgtagcctcaaatgcagaacttgagagccagttccaagctgtgaggaggcttgtagcctccaaagctggtttcctggccttcactcagcttccaaagtttcgggagcgcctaggaatgaaggtagtgaaagcactcaagagaagcaacaacggagtcatccatgcggctgtggatatgctctgtgccctcatgtgtcctatgcatgatgactatgacctaagacaagagcagctaaacaaagcttctcttctctcttcaaagaagtttctggaaaacttattggagaaatttaattcccatgtggatcatgggaccggtgccctagtaattagttcactcttggacttccttacctttgccctctgtgctccatatagtgagacaactgaagggcagcagtttgatatgctcttagagatggtagcctccaatggaagaaccctttttaaactctttcagcatccttccatggcgattgtgaagggagctggattggttatgaaggcaataatagaggaaggtgacagagagattgctactaagatgcaggagctcgccctaagtgagggtgccttacctcgacacttacacactgcgatgtttacaatcagttcagatcagcgcatgcttacgaatagacagctaagtagacatctagtgggactctggaccgctgataacacaactgccacaaacttgttgaaacgcatattgccgccaggcttgttggcatacttggacagttcagatccagttccggagaaggatgcagaccgcatgcacgtcagagacaatgtgaaaatagcaatggatcaatatggaaaatttaataaagttccagagtggcaaagactagctggaaaagctgccaaagaagttgagaagtttgccaaagaaaaggttgaccttgtgttgatgcactggagggataggatgggcatcgctcagaaagagaatataaatcaaaagccagtagttcttcgaaagagaagacaaagaataaaaatagaagcaaactgggatctcttctattacaggtttagtcaagaccacgctagatcgaacctcatttggaattttaaaacacgagaagaactgaaagatgcccttgagtctgagatgcggacatttaacattgatagggagctgggcagcgccagtgtcatctcctggaaccaccatgagtttgaggttaaatatgagtgcctggcagaggaaatcaaaataggagactattacttgagattgttattggaggaggatgaaaatgaagaaagtggatcaataaaaagatcgtatgagtttttcaatgagctctaccatcgcttcctgctcactccaaaagttaacatgaagtgtttgtgtttacaagcccttgctatcgtttacggcagatgccatgaagaaatagggcccttcacagatacgagatacatcattgggatgttagaaaggtgcactgataaactcgagcgggataggctgatcctcttcctcaacaagctgatccttaataagaaaaacgttaaggatctcatggactcaaacggcattagaattcttgtggacttgctaactcttgcacatctccatgtgagccgagcgacagtccccttgcagagcaatgtgattgaagcatctccagatatgaagagagagagcgagaaggagtggtattttggcaacgcagacaaagaaaggagtgggccgtatggatttcatgagatgcaagaattatgggccaaaggaatgttgaatgcaaaaaccagatgttgggctcaaggcatggatggatggcgaccgctccaggcgatacctcagcttaagtggtgcctgttagccagtgggcaggctgttctgaatgaaactgaccttgctaccttaatactgaacatgttgatcacaatgtgtggatattttccaagcagggaccaggataatgccatcattcgtcctctgcccagagtgaaaagactgctgtcagatagcacctgccttccccatgtcatccagttactgctgacctttgaccctatccttgttgagaaagttgccatcttactacatcacattatgcaagataacccacagttacctcgcctctatctcagcggagtgtttttcttcatcatgatgtatacaggttccaacgtgcttcctgttgctcggtttttaaaatatacacacagcaaacaggctttcaagtctgaggagactaaaggacaagatatttttcagagaagtatacttggacatatcttacctgaagcaatggtttgctacctagaaaattatgaacctgagaagttttctgagattttccttggtgaatttgacactccagaagcaatctggagcagtgagatgcggcgtctcatgatagagaagattgctgcccatcttgctgacttcacccctcgcctgcagagcaatacaagagcactttatcaatactgtcccatcccggttattaattatccacagctagaaaatgaactattctgtaatatttattacctcaaacaactttgtgatacactccggtttccagattggccaattaaagacccagttaagcttctgaaagattcccttgacgcttggaagaaggaagtagaaaagaagccacctatgatgtccatagacgatgcttatgaagtgcttaatctgcctataggccaggggctgcatgatgaaagcaagatcagaaaagcttactttagactggcacagaaataccacccggataagaacccggaaggaagggacatgtttgaaaaagtaaataaagcatatgaatttctatgtaccaagtcaacaaaaatagtggatgggccagatccagagaatataattttaattctgaaaacacagagcatccttttcaaccgccataaagaagagttacagccttataaatatgcaggatatcccatgctaattaggaccataacaatggagacttcagatgacctcctcttctcaaaagaatcaccactgttgcctgcggctgcagagctggctttccacacagtcaactgctcagccctcaacgctgaagagctcaggagagagaatggcttagaggtattacaggaggcatttagtcgctgtgtggctgtcctgaatcgctccagtaagccaagtgacatgtcagtgcaggtgtgtggacacataagcagatgctacagtgtggctgcccagtttgaagagtgccgggagaagatcacagaaatgcctggcatcatcaaggacctctgccgggtgctgtattttggcaagtgtatcccacgggtggccgccctcgcagtagaatgtgtcagctctttcgctgtggatttctggctacagacacatctatttcaggctggaattttgtggtatctgcttgtttatctgtttaactatgactatacattggaagagagtggcattcagaaaaatgaagaaacaaaccagcaggaagtagccaacagtcttgccaaactcagtgtccatgctctgagtcgccttggtgggtatttgtctgaagaccaagcaaccccagaaaatccaactgtaaggaagagtttagctggcatgctgacaccctacattgctcgaaagctagctgtagctagtgctactgagaccctgaagatgcttaacagcaacacagagagcccgtatttgatgtggaacaactctacaagggcagaactgcttgagtttcttgagtcacaacaagaaaatatgatcaaaaagggtgattgtgacaaaacttatggggcagaatttgtctacagtgaacacgccaaagaacttatcgtgggtgagatttttgttagagtctataatgaagtcccaactttccagctagaggttcctaaagagtttgctgcaagtctgttggattacataggctctcaggcccagtacctccacacgttcatggccatcactcatgctgcaaaagtggagtcggagcaacatggggaccgcttaccaagagtggaaatggctttggaggctctgagaaatgtgatcaaatacaacccaggttctgaaagtgaatgcatcgggcactttaagttaatattttctcttctccgagtccatggagctggtcaagtgcagcagctggcgttagaggttgtgaatatagtgacatccaaccaagactgtgtcaataacattgcagaatccatggttttgtccaacttattggctcttctacactcattgccatcgagccgtcagcttgtcctggagactctttatgctttggcatcaaatacaaagataatcaaagaagccatggcaaaaggagctttgatttatttattggatatgttctgcaattcaacacaccctcaggttcggtcccagacagctgaactttttgccaaaatgacagcagacaaactaataggtccaaaggtgcggattacattgatgaaatttctgcccagcgtgttcatggatgccatgagagacaaccctgaagctgctgtgcatatatttgagggaactcacgaaaatccagagctgatctggaacgacagctccagagataaggtttccacaactgtgagagagatgatgctggagcactttaaaaatcaacgggacaaccctgatgtgaactggaagttgcctgaagactttgctgtggtgttcggagaagcagagggggagcttgctgttggaggcgttttcttgaggatctttattgcacagccagcttgggtgctgaggaaacccagagaatttcttattgcactgctagaaaaattaactgagctcctggagaagaacaatccacatggagaaactctggaaacactgaccatggcgacggtctgtctcttcagtgcacagcctcagttggcagatcaagtcccgccattgggccatcttcccaaagttatccaggcgatgaatcacagaaacaatgccattcctaagagtgcaattcgggttattcacgtcctgtctgacaatgagctgtgtgtccgagccatggcgtccttggagaccattggcccactgatgaatggaatgcgaaagcgagcagatactgtgggcctggcctgtgaagccatcaaccgcatgttccagaaggagcagagtgagctggtagcgcaggcattgaaagcagagttggtcccatacctcttaaagctgcttgaaggcgtaggccttgaaaacctcgacagtcctgctgccaccaaggcccagattgtcaaagctcttaaggcaatgactcgaagtctgcagtatggagaacaggtgagtgaaatcctctctcggtcttcagtctggagtgccttcaaagaccagaaacatgacttgttcatttctgactcccaaacagcaggatacctcacaggacctggagttgctggctaccttacagcaggtacatcctcatcagccatgtctaatctgccgcctcccgtagaccatgaggcaggagaccttggctatcagacttgaagcactcagacagtaaatgctggaaggccagtactgcgcccacattcctccaaccaacatgttgaaacagactccgctgcctttctcctggtttcatgacagtgttattcctttttctataaatagacttttatttaggagaagagtccatgattctgacgtatcacgttctgagaaagcactctgtgggtcagccacctgggtacacaagaatttcttcttcttgatgtatgtaagcacattttgttcctttatatctgtttacaagactgtgaatcaaaaagacaaactttcttcctagtttttataacttttttttgaattactgtgactgtgggattaagctgcagtctacaaacattgggctaaatcttatcccagagcagggcgcctctctctcctgcaccaggtctccatgaccgtcttcctctcatcgtccctccacccgtgaccagatcctcaatcattaactctgagagctcggtgcacatcggtgtgtatgacaggcgtcaccaaactgaacgacaaggagcttgtgcaaaaaaattaaaactaaaaatggatgtgaagatgttatgtaagagattagtgtaattgtgaaatgttctatacattatcaaatatataaagctttctatattgaatgtacattatacagatcattcatatgtgtacataaaattttaaaaataaagggaattgactgctttgttaatgagatatgtatgttctgtaattttagcctttggaaacttcttccatgttcacttttgggggagatggaacagaagcagacaaacacccctcaccctcacacgcacagctgtgcccacctccgttcactcactggaaacagcagcttagttacttcttaaatcgtgtttaggtgtgagctaaggaatgctgccagagtctcacggtctaatgtttcaggcgggaggtaaggaaccagcaaatatatctaataacagatcctaatgcataggtcttccagttagactgcagactacagaaaataaacatggaaagtcacgc

SEQ ID NO: 2426 - protein, 2225 aa, Mus musculus
MNIIRENKDLACFYTTKHSWRGKYKRVFSVGTHAVTTYNPNTLEVTNQWPYGDICSISPVGKGQGTEFNLTFRKGSGKKSETLKFSTEHRTELLTEALRFRTDFAEGKITGRRYNCYKHHWSDAKKPVVLEVTPGGFDQINPVTNRVLCSYDYRNIEGFVDLSDYQGGFCILYGGFSRLHLFSSEQREEIIKSAIEHAGNYIGISLRIRKEPLEFEQYLNLRFGKYSTDESITSLAEFVVQKISPRHSEPVKRVLAVTETCLVERDPATYNIATLKPLGEVFALVCDSENPQLFTIEFIKGQVRKYSSTERDSLLASLLDGVRASGNRDVCVKMAPTHKGQRWGLLSMPIDEEVESLHLRFLAAPPNGNFADAVFRFNANISYSGVLHAVTQDGLFSENKEKLINNAITALLSQEGDVVNAELESQFQAVRRLVASKAGFLAFTQLPKFRERLGMKVVKALKRSNNGVIHAAVDMLCALMCPMHDDYDLRQEQLNKASLLSSKKFLENLLEKFNSHVDHGTGALVISSLLDFLTFALCAPYSETTEGQQFDMLLEMVNGRTLFKLFQHPSMAIVKGAGLVMKAIIEEGDREIATKMQELALSEGALPRHLHTAMFTISSDQRMLTNRQLSRHLVGLWTADNTTATNLLKRILPPGLLAYLDSSDPVPEKDADRMHVRDNVKIAMDQYGKFNKVPEWQRLAGKAAKEVEKFAKEKVDLVLMHWRDRMGIAQKENINQKPVVLRKRRQRIKIEANWDLFYYRFSQDHARSNLIWNFKTREELKDALESEMRTFNIDRELGSASVISWNHHEFEVKYECLAEEIKIGDYYLRLLLEEDENEESGSIKRSYEFFNELYHRFLLTPKVNMKCLCLQAIVYGRCHEEIGPFTDTRYIIGMLERCTDKLERDRLILFLNKLILNKKNVKDLMDSNGIRILVDLLTLAHLHVSRATVPLQSNVIEDDMKRESEKEWYFGNADKERSGPYGFHEMQELWAKGMLNAKTRCWAQGMDGWRPLQAIPQLKWCLLASGQAVLNETDLATLILNMLITMCGYFPSRDQDNAIIRPLPRVKRLLSDSTCLPHVIQLLLTFDPILVEKVAILLHHIMQDNPQLPRLYLSGVFFFIMMYTGSNVLPVARFLKYTHSKQAFKSEETKGQDIFQRSILGHILPEAMVCYLENYEPEKFSEIFLGEFDTPEAIWSSEMRRLMIEKIAAHLADFTPRLQSNTRALYQYCPIPVINYPQLENELFCNIYYLKQLCDTLRFPDWPIKDPVKLLKDSLDAWKKEVEKKPPMMSIDDAYEVLNLPIGQGLHDESKIRKAYFRLAQKYHPDKNPEGRDMFEKVNKAYEFLCTKSTKIVDGPDPENIILILKTQSILFNRHKEELQPYKYAGYPMLIRTITMSDDLLFSKESPLLPAAAELAFHTVNCSALNAEELRRENGLEVLQEAFSRCVAVLNRSSKPSDMSVQVCGHRCVAAQFEECREKITEMPGIIKDLCRVLYFGKCIPRVAAVECVSSFAVDFWLQTHLFQAGILWYLLVYLFNYDYTLEESGIQKNEETNQQEVANSLAKLSVHALSRLGGYLSEDQATPENPTVRKSLAGMLTPYIARKLAVASATETLKMLNSNTESPYLMWNNSTRAELLEFLESQQENMIKKGDCDKTYGAEFVYSEHAKELIVGEIFVRVYNEVPTFQLEVPKEFAASLLDYIGSQAQYLHTFMAITHAAKVESEQHGDRLPRVEMALEALRNVIKYNPGSESECIGHFKLIFSLLRVHGAGQVQQLALEVVNIVTSNQDCVNNIAESMVLSNLLALLHSLPSSRQLVLETLYASNTKIIKEAMAKGALIYLLDMFCNSTHPQVRSQTAELFAKMTADKLIGPKVRITLMKFLPSVFMDAMRDNPEAAVHIFEGTHENPELIWNDSSRDKVSTTVREMMLEHFKNQRDNPDVNWKLPEDFAVVFGEAEGELAVGGVFLRIFIAQPAWVLRKPREFLIALLEKLTELLEKNNPHGETLETLTMATVCLFSAQPQLADQVPPLGHLPKVIQAMNHRNNAIPKSAIRVIHVLSDNELCVRAMASLETIGPLMNGMRKRADTVGLACEAINRMFQKEQSELVAQALKAELVPYLLKLLEGVGLENLDSPAATKAQIVKALKAMTRSLQYGEQVSEILSRSSVWSAFKDQKHDLFISDSQTAGYLTGPGVAGYLTAGTSSSAMSNLPPPVDHEAGDLGYQT

SEQ ID NO: 2427 - DNA, 141320 bp, Homo sapiens
ttctcactgtgtgtcaaggacatttttgctaaacctgggtttatgttttagaatcaatttggttgctgacagagatttaaattcaaaaataaatgctatttcattttcatatttggaaacaatcttaaattatatgtttaacatatataaatacagaaatatcttatggcaaacatagttttctaatagttacatattgctatagtctgagtgtttgcaaccccccaaaatttgtatgttgaaatactaccctgcaaggtgatagtattaggaggttgggcctttgggaagattaatgcctttgtaaaagaggcctgagagaaatcccttaccccttccatgatatgaggacactgctatacaccatctaccaaccagaaagagagttcacaccaaacaccaaatctgctagcaccttggacttcccaggctccagaactgggagaaatacattctgggctttattattattgttgttattattattgagacagggtctcactctgtcactcagactggagtgcagtggcacagtcacagcccactgcagtgtcaatatcccgggctcaagtgatcctcctatctcagcttcctgagtagctggaaccacagggttttgttttgttttttttccatgcccagctttttttttttttttttttttggtagagacagggtctcactatgttgcccaggctggtctcaaattccttgactcaagtgatctacttgcctcagcctcccaaagtgttgggataacagacatgagccaccgcacccaatcgcccgcaaattctgttgtttataagttgtaagtttatggtattttgttatagcagcccaagtgaactaacacatggttttccagtaatcaatatttacacactgacatataggttaaagaaatacatattaaagaaagtatatgtcttctccgattatacagaaaaaaaaggataagaaggcaattacatttaatgatctggtatatttttaaagagttccttaatccaatctattcatataatttttgaaagactctgctttcagatcataaaggggaagctgatataactaagcctataaataagactacatgttggaaaatccttagagtggaaatgataatgaatctcaggaaaaatataactacaacatttctaaataactattaacatatacattttttctccagtggaaattctatttatcacctttgtaatccccctaagactatctgtgacctccatatgtacgtatcttttcccccacctactgacagtaatataataaccactacacagtttatgttctagtcatgacataaaatcttaaaattcccagaggaaggaccaaaagaagatttcagtcagtttattccatttactcacagcgtaccatttgacttagaaataaaaacagcagtcagtgattgctcttagagaatgctgggccatggaaccaactggatttgggttcaaattctaactctggcacttacttgactttgaggctttggacaaatcccattagctctctgaacgttggggagcatcttcaactgtacagatggggttagcaacaggtagcaacaggctgttctaacagagcagggtgcgtggtaaactttcaatgtccagcaaagccttctcttataactctcctttgatctctcaggcctatcttcatttcctgttatcatcatagttatataaagcctcttgttccatattttcacagatttttttttaaatctctccaattcagagctggttttatatcgctagaggttctcaattctatactcatgaaattagtgaaggaaacataacaaagttctaatttctccactgtgattattattttgatgccttttataaaacattagttagcaaatccttttcaagtttatttcatcttgatggtccttgctttcctggtgccctaaacgcttacttaatacagtactactccaaatattgcattatctgcttctagaattacggaggaagaaaacaaagggtatataaggaagggagaaagttaacacttacggagaatgagtggtgcttactaaatgatccataaacgttattttccttctgcccttcattcttggtttttaaaatctgggaaagtattaattcactccctattattaaataaagaattggcacatttagactatctccctctcccttatcccattttttagagtttatgacttttatttttctattatatacatttataatattaaataatattggttcatcaatattagatagcatagcatatcttgattcttatataatatcaaaacaactgttgttgacatgaattattaccttcatctcattgataaagaaattgaggctcaaaagttaagtggctaataatgtagaactgggatttgaacatttgtaaggtagagaaaaaaatatatcccctagtaagtaaatacattgtcagaagacagttataaaccagaaaaaaaataataccttacttgctgtaactaaacctctgtttctttctagtatagtatactattttctttttgctctactttacttattatttaggtagtatttagagattccagttgtgctgtactctggtgaagagattcaaaggaataccaaacaaaattgcactttgttctgtgaagctcattaatgtggctatttttattggtagcctcttactatattgtgctgaaatagtaatactctattaatttctttttatttgcatgaataacacagtgacactcaatagcccagcccttaaaaaatgtaacatcattgagtaatgaattcagaaatgaagcagatgcccacagacaagcagctctagccatcacaactatgctctgggcacaaaaaaaacgtaaagggtgggggaaaaaggacacctactagctgaatctgatagcccacaccaacaatatctgcttatgtttcatcggccagacttatgtcatctctgatatggtcagccgatctgagaggaggttgacgatgtagtacttgtaggtggcacattgccaccttcaacttgtagggaagaagaggaaaatgatattgggtaggcaatagtatttactctggaaatatacagggtttctaaaacttaacatgttcaaaccatactttttttaaaattttactttaagttctgggatacatgcgctgatggttatagactttttttaaaaaaaccttttttaaacaaaattttagtttaagttctgggatacatgtgctgaacgtgcaggtttgttgcataggtatacatgtgccatggtgatttgctgcacctatcaacctgtcatctaagttttaagctccgcatgtattaggtatttgtcctaatgctctctctctcctttcccccgaccccacaacaggccccagtgggtgatgttcccctccgtgtctatgtgttctcatttttcaactcacacttatgagtgtgaacatgcggtgtttggttttctgttcctgtgttagttttctgaggatgatggtttccagcttcatccatgtccctgcaaaggacatgaactcattctttgttgtggctgcatagtattccatggtatatatgtgccacattttctttatccagtctatcattgatgggcatttgggttggttccaggtctttcctattgtaaatagtgctgcaataaacatatgtgagcatgtgtctctatagtagtatgatgtataatccttcaactctcaaagtttgtctgacaggcagattaggaatagacccaaagtaactttaacatttgcagtgactagtatatgtgagtttcttctatattagtaagatttttttcaaattggctttgttagtatgtgctttttattttggtttacattgatttacttttttttttctcagacttcactgtatagatttgagaaccaataactttacaagctaattagttgagcttgaaatactacttcttttatgttttattttcctttacgctaagtaggtggctgccacctcatttactgttgctcacaaaaagaaaaaaaaatcatcttttcattgacaaaattaagttttacatggaaataacagtcatatcatctttatatgctcaaagccagcaataatttgggtaatgaagttttatgttctcagataggcataatatgaataagttattatccaagattaatgaatagatatcctttccttctatgtggttgcaatgatctttaacaaaattagtgggaaaaaaaagcttttgttgcacctgattaactcaccttgatttaggcgtgaatgagtcattgtcattctaagaacttcctcatggtcaagttttggatcaccatttttaaaatatattgtgactgtcgaaattccatgcatgtaagacttttttgcattgttaacattcacagatgaattgaacaagtcaactctgtgttctccataataaataaaatgaactatttaatgatgtctcatgataggagtattcaaatatggttgtcaagaatgaacacttgaactttccccattctgctaataatacagaatatctgcttatctgacattctgtattattagcatctggttagtcctctgatgataactacagcaaacctgtttcatttaaaaacgcaaggacaaggattacataaagaagctggagaccctgatattaactatagtgtgtgctcagtaatgaactgctctatataagttattatctgtattatcttcatctggttagtcctctgatgataagaactacagcaaacctgtttcatttaaaaactcaaagacaaggattacataaacaagctggagaccctgatattaactatagtgtgtgctcagtaatgaagtgctctacataagttatgtaactcctgcaaatgtctctcaaggtaggtatcaatatctgaagtttacagaagagggaactaagactcaaagaggataacgaacttgcctgtgagttttttaaactacattatatttccttcaagtgctgatgactaaaaatgtctgaatataataatttcatagcagattggaaatcttgttcacttcaaaaccctttatggaaaaaaccacataaggttcttgagttttctcaaatctgataatacaagaagtatttgaattaattagtaagaacacctgaattagaaaaccctcagcagtgtatatattgtaaaagagcagttgtggtaaaatttaataaggaaaaagaacacaggcctttttcttaaccagttaaaatttcaataatagtttaaaattgttagaccacagaataagttattttcttttccctcctcatccatctttgaaaatataatcaaatctagataatttcctgtaattaaatgaaagcatgtttttgttaataaaatattataaattcaaaatcctttatatatgaacatcattatactatttaaaaagatattttaattcacattaataataaaactagacttcctggggtaggattaagtgagctggggaagccaggctatcagttacaaaaaaaaaaaattgtggatcctatatatatatacagatacatatgtatatatgtcaagaaattctcatgtcataatttgtcatatgttgtaaataatttcaattatttgaattacagtatagagaaacacagaaaactaaatacgtgtggccagataaatcttgagaaaaaccactaaagacaaacaaccaaccaatcacataacaaattaaaatgaagtccagtagaagattctgtggaagcttcaagctcaccaactcgacgtagttgttttctgacacttactgtttgcttgcacaagattttctaatagcagtattgtccaagagaaatacaatgggagccatatatttaattttacatttactagtagctacattccttaaaagaaacaagtgaaattaattttaataacattttatttaaccaaatatacagccataatattatcatttccacatgtgacaaagagtctttgctcagccaaattttaatcaggcttctgaacctttccttaggcccctctgtgtgcttccttgaaaagtctagtctgcaaaagaacctggctaagtcagtttagccaaaattccctcgatatgtgatcagattcctcatctttcaccttcccccagaagatgtctaatcactctggcctgtctttagcaagaatcctgttacgtaggtttagccaggatccccgctcacccctgatgttttctcttagtaattttccatccactgacccccacacactgttccttggagataaatgcatacttgcccgtgtcgttttccgacctgagccccgtctctctcccttactgcaagcccctgttgcagtggctcctgtacctattgtaatgatcgtaaataaactgaataaaatcttttttgtggggagcagggggtacagggtctttctctgctgcccaggcaggagtgcagtggcacaattatagctcactgtaacctcgaactcctgggctcaagagatcctctcacctcagcctcctgagtaactagcactacaggggcatgcccccatgcccagataatgcttttatttttattattttgtagcaatggggtcccactacattgcataggctggtctcaaactcctggcctcaagtgatcctcctgacttggcctcccaaagccttgggattacaggtgtcagccatcatgctcagcctattaccaagctttaacaagtatcattaaataatactttttttttttttgagagtttcactcttgttgcccaggctggagtgcagtggcaccatctcggctcactgcaacctccccctcccaggttcaagtgattctcctgcctcagcatcccgaatagctgggattacaggtatgcaccaccaggcccgcctaatttttttatatttagtagagacggggtttcatcatgttggccaagctggtctcaaactcctgacctcaggtgatccacccgcctcagcctcccaaagtgctgggactacaggcgtgagccaccgtgcccggcctaaatatttttttcttttaacacgtgtaatcaatataaaaattgctaatgcaacattttacatttttttgtaacaattttaatttttattctgtgttcagtagccacatagggctagtggctactgtactgaaaacatagttcaagcattgttgagtggtatgagttcttaaggatttactttggatctgggcattgatataattaggaaggtcaatttagcagcaatgggaattagataagcaagtgtttgacattcttgtgggctctctaaagtcttagatcactccagccttgtatgctaactttggagactgataaaggctattggtgcctaaaaggctgtgaaatgtattttttaaaaagctgtgaaatattttaagtgtacatcacataatttagattgtaaatttgatacatctgcactatgaaagtgtcagaaacgctagtgcaaactttaattatgaataaaaagacaaatccagaaaaagaagtgtgcatttgtcactcttaaaaaagagttgggtggggaaaggatccaactgatttaacctaatagggaaagaagagacaagtcctactctccctgactcttgtattttgttgtggcattttaagaaggatccaattgtatggatccaattaaaagcaaccagtggttgtgaaaaggcttgaaactacatcttgtgaacaatggttgaaagtactttgaatatggtttcttaaaatgagtatctgtagcaggggtagttagaaggatatgcacgggagagggagtgggaaagggtgataagctgtactgataagtgcttaaatgaatgtcacatacaagaagaaaagagcaagaaacaaagacaaaataactactcatagaagagagtgcaagttggctgaatacaaggaaaatggcttataaaaatgcaatggaaaaagatgtcttgtgaggcaattttccactacagaggatggggacaattcatgatgcctaaggctcctctcaacacgagaattgattttattggtctcaaatattgaacagagaggcagtgtggaggttgaacagttcactggccttgatgttacaggcaggccctgtgtcttaatcttggctcaacctttaggagttaggtcacctttagcaagtctcctggactctctgggtctgctgcttctctaaaatcgaaataatataccccacatttacttttgggattactggaaggctttgtaaccacataaacacgtttctgtttccatgggataagccaataaggccccttaacacagccctcctgtttctttttcctcctcctcccttcctactctatttcgggttctgtcttcccacacccagctattcctagtaccttcccttacatgcaccttatcttactgctgcattacagaaaagtctaaggataaacacaaatagtctttttccgccctaaggtagggcaaagggttaatagaatcaagaggtaaagtctgtaaaaaccatttttccacattttttcatcctgcaatcgctgtctataaaatgagccaacttgctgaaggggacgccaagaaatcacaatttcaggactgccatgaagaatgagtattcaactccttatcagagacctttaacccttatacaataatgtatccatgcaggtcaccctacactgcctctactctgaagtctgcagcagaatcactattttttttttaatcactaatttttaaactgtggtctttacggctcagatctgggagtggacattgacctttcttatttaaaccattgcccacagataacacataatttctagccgaatcctttagtcccaatatcccctcttttcactgccctgacttccctctcaggtgaggttcaggaagatggttatctagagggcacaggttctgggttcaaattacttgggtgcaaacatgaaatccactactctgaggctgggcctcaacttatctgcaaaacgaggatgattcgtatctcagagagttgaagattaagcagctttaagtaaacttctaaacacttgatccggacacaataaatggggctaccagaactatctttccagcattcccacctgcaaatgccttaggcgtctctgagaatttggtctctgagaccttccagagcatccataacttaaaccctgctctgctgtcgttcaggacgtctcaatagtaaatgaacctgctggctcccaatccagccaaaccaggagataggctgaggcttcagactgcctcgcagatgctccatggcacttgacggcaagagctaaaaagaggtgatttaaaacaagatttcctcggacttaaagcttaagtaccgggttgcgaccctactctccgcaggacataagcggaggggcgcggccctaaggcacacgccggaggggcgtggtcatgggcacccgccggaggggcgtggtcatgggcacccgcgcgcgcccaggggcgtgtccttttcagcacccaccgaggcgccagccccctgacgcgctgcgtggaatccaaatcccacggccggtgtcgttactctgcgcatgtgtagctgctgggggctggccggaggaaagcagaatttcagggaaagaacgatcgggacggggaggacggggagggcggggcagaagacggaagagttgaaatcagctgactgggtctcgtgacagcctgggcggtggcgacgcaggcgtattagagcgcgctcgctcaaagcctgagcgaagatggcggcctccagagtgaaactctgagaggcagagggaggaggcggagggggcggggaggcagcgccgcggcggcaccaggaacccgcggcagcggagctgcagggccccggcgggggaaaggggaagtggtgagggtgaggaggccggagggcgcctcatcccactctggaagctgagccggcggcgggaggagctagggctggagcctctccagcctcccgcgaaggtaaagccgactccgggcactgggctctggggctctgccttactcccttcccacgccgtggggactttgtggggctcagggcagggaaaacggggtggtcttggctgctgcagcctgcagctgctaaggaagcagattacccttcccccaggctgctggtctggttcctttcgttggacgcccccccggctttgagtgacattagctcagggcgctgccctgtccagccccaccccttttttttgcttgttttatacctagtacgctcctccactcgccttaacatatccttaccccacaggctcttcattcccttgtgggttccgccctcgggattcccttccagtctcctagtctgagcacccttcctgctggatgccggcaactcttgtttccttgggtcagcgaccctccttccgaacaagtcctgcagactgactttctttgctttgtttcgttttgttaggaaatgagcatccgcgtcgtctgttctccagtactttttctaaaatcattttctcccctaaggcttttccttcctgcaaggcagcttattcacgtggcctttcctccgctgctgtgattttatctttgaatgtggcctttggagtgggtaaagtaggacttagacgctcagtgaagtggctgttaatcacttgatacttaactatgtttaagagtgccttcccttaaattttctccttttgtagcgtgttccgttaaccacgtttgtcttaagattgtttcctgtgtccgttgcttagaggggggaaaaaagtaaagatttcaccctaatgtggcggtggtctcccaaagtaattatttctcattttccctctgcttttcccttttacgttattctgatttccctcaaaaaggaggttctgtacctgatgctgttgcgtcctctatgaagggctttatagtgtacagttatgttgagccttttgtaatacagtgtcttggggaaaaaagtagaagttcagaacctgcccccagtaattctttcttactatattttctttctcagtttatggacttgataggtttctaggtttgaaactactgcctgcagggaaaattacagtgataaggttttataatatattaccagtactttgagtttatgggagtatgaaacagaatttgccttaaaaaaataaatttatagaaaccacttgtcagaaattcggtatccagaacacagttctttgatttttggaaagtactttattggcttatctatcatataacgtaaaaccttgttcacattttgtgtaatgtgaaacgctttttaagctactatatctcagacttggcttgtgctgttagtatcacaatgcattcaggcaacacacgtccttgtgtagaaattattacattatactccttgtttgaaaacaggaagtagaacatattaagggaggaaaagaggagtcagaggattattaagaaataagaatgtaaagaaccttaaggctagagttcagttcatggaaaatatcagcatttgtattccactgagaggcaatgaatattcctctttttctaaagtggtagtaataaatagtctaaaatatattaatgttatatattgttaacaagcttagttgtaaacaaaatacttaagctaaaaaataaaatattaataagtgaatgaattgtttggaataatttaactttatccacaaataaatagaagatggttgccttgcccaggtggactgtaacaatactggctttattaaatttgttaaaaggttgatagtggagtccggttctcaataggtcccaaattagggttgaaattgaaaagatgtgttttaactaatttggcttcattcctcaaccagttctgtttacacaggtgaatatgaggtttctgctacacatacctttcccctgcttctgattgaggtactttaaattagtaattgaaacaaggctgtgcagataaactgcagcacaaatttggttgctacaaataggttttggcctaaatgttcactgtaaaacatggcagtagttaaaggggagttattaatattttgaaagagttccttgagtcagtgtttctcaactttattagacccaataaaggctccctttttataaaaaataattagtaacaccttctttgctatctttagtttataaataatgtaactacctctggctttggccctgagacaaaaaaagaagctttgctctcacttctgcaacaaaaaaagacctacactacaaattcatgacttttttgaaatctattaaagagctgagtccacagagcaaaaccactggctgaaaatttgagagacagtgcttacagagagtagatgtcaatttctgtttaccgtcttcagacacaactggacaaaaagcatgatgaaagctgaatgcacaatcttgcaaactcttatccacaaacctccctgggtctactagaaaagactggaaagaaccctgggtgagtctgctgtgcagattgagagggagaggaacagcaacagaacttttaagagggtcaagaaactgctgtgattcttcccctctgcctcttctatggaaaaaagctttaatctctggggagaagggtatctctgttggccccattggtgaacattcagggggtagatgagaagtgggagagaatcttatgcctggaggaggggccctgagcccaaaactgcagtcgggagtggtcaacagaaccgagagtgctgccctcctgagattcaggaacacagtgtttgacttagacttaatcagaacatcagactgtatcccccacccccaaccccctgccaccaagctaagaagctttcagtaacaagtaacccacaaaatactactaggaaaggaacaagattatgcaaagaggcacaacacaaagaatcaaacaggcattgctctagtaaaccatcgcccaccagagagacaaactgttctgcagattcatgaaggctgtaatacactgaggataactatggcaaaaacaaatcataaactaagtccaactcctaaccagattaacacaaacccttcaccaaaggcctcacaaagaacaggcgtgctcatttccagtcataaaaattacctcaatctctactcctacacaacatgtccagcttttaaccaaaaattatgaggcccatgaaaaaaactcccaagagaaagagcagtcatcattatacattttttaaaaagataggagcttaaaaagaactgttttgtacatgttaaatactataataatgacattttgccttgaaaaagtttgagcaaacaatgcagtgagcattggatggagttatagtttctgaattactgtgaagtagtagaaggaaaaaaagttataagatggagtggaaaattagtaacatatatgtgaatgtatgtggttcattgaccacctgaagtgtgtgtgtgtattttgtgaattcctgcatgactcagttgggtacaattttctgcgttcacttagtgttgggacagaatcactataagcaaatgtgacattttcattatgctcaaattgttcagtaatacaccaatcctgttaaaattcacatgatcaagaaagcattatagcagaattgactatatgcatttcaatatgtaaatagttaagtatgattataccaaaatacacaaaggacgtgtcagaggcttgtatctttacatggaatcattttgagattttttttgtgtgtgtgagagacaatcttgctctgtcacccaggctggagtgcagtggcacgatcttggctcactgcaacctctgcctcagcctcctgagtagctgggactacaggcgcttgccaccatgctgggctgatttttttttttttctgtatttttaggagacagagtttcaccatgttgcccaggctggtctcgaactcctgacctcaagtgatccacccacccaggcctcccaaagtgctgggattacaggtgtgagccaccatgcctggcccattttgatttttgacagaaatgttgatgtctacagatttgtcacattggtgactcaaataccacaattgagattattagcattgtcagaaaagaacagggttaataaagtataatctcttaatttacattgcagccacattcctggaaaaatctctgtatattaaaccctgcaaaatgtacttggtgagttatatataaaacaattagagtctgggattcattcattataaataggtttttgcctacatgactaaccaactaagcatttggacttctggacttttttctttttcctttttttttttcttttttcagacctcactctgttgcccaggctggaatgcagtgacacgatcatagctcactgtagccctgatctcctgggctcaagcgatcctcccaccttagcctccttagtatctggagccataggcacgccatgcccagctaacttttttttattattattatttttagtagagacgaggtctcactatgttgcccaggctagtctcaaactcctgagctcaagcaatcctcccacctcagcctctcagaatgctgggattacaggtgtgagccaccatacctggctcacttggacacttgaaagtcgtatggtgtggatggtacttatctttgggactgtaatgtatgttgaatatctagtctcatccactaaatgctagtagtgctcccagtcatagtgcctcagatgggatggcatcctagcccaaccattactttagttcaaaattttaatcagtggttttcaacatattttttctgtttcagcagtgttcacatacccagcatatgccaatttataacacttcttgttatgtggagtgattcttaatcataggaactcctttgagagtaactgagttagatttctttgtaacaaatagtttaaaccaacatggttatgatcatctttgctaatttaagatagttacctgtgcaaaggtacatttaggtgtggttcagtcaataaaaccatatagcttgctagtaattcttttcagatgctctttattcaatagtcgacatatgggagttttacttgtactttcatggactacttgtgaaaaagagtgagctttaaagtcagtggaattttacagtttaagcactcaagttgcccttagaagaacactgcctagtcacatatttagcacatgcccagtggtaatatctctttgcaatggattaataagagtttgatattttgattatcagatagaaaacaaaacccctaaagcaatccagaattattttagctgggtgcacaataatcacacgtgtaatcccagcacttggaaggctgaggcgggaggatcactcgaggccaggagctccaacctagcttgagcaaccccgtctcatcaaaaaatgaaataactagctggctgtggtgacgtgtgctcgggaggctgaggcaggaggattgcttgaacccaggagactgagattacagtgagctatgattgtgttgctgcgtttcagtctgggtgacaaaggaagaccctgtctcttaaaaaaaattatttcgacgctttgatttttgccagctctagttgccacaacttaatggaagggttggtgaggttatgaatggaggagatgttctctaatatttcatgtattctgtaatacatttaaacgcttatacatggtgttctcacttttattgtattccttagtcatctaaggctatggggtttctctcctcaaacttctagtcaagctacagaatgtattttgaatgtttatcaaatcttagagcagataagccattttccccccaaatcttagcactaatgggcttaattttaaaagtgaaactttgcttttttaagataatttggtagtgttctataaactgtaaagcgccacagaagaggtaggaataatagggatatttcagaactaaactagaaatgtatgtttttgctattttgtattgagtgaaggggaaattgtagcaaattaaacttttgtcttttaatagtataaaaagaacagtgtttgggttttcaggatgctttctgtaaaactgtcttcaagttgtatgtgttaaaagcttaggaaatttagtcccgcattatgcatttactgtaatgataggaaaaacagcaacaagttaaaatatggctgctaaaaatttcttttgcccatttcagggcctgtttaccatagtagagcatgattattaagtgccttaataagctgataagcttaataagttgataagctgaagaccttacagaaatagtatagtttgttcttgcataagccaggttatgcttcaaagataaaatgaaatagaaattaggtctataaagttacaataatgtgtataaactaaaaatatgtaaatgatcaatagcaatgatttcaaagcattgcttaagtgaacatgtttctggaaagaaagctttcaggtgagtattttaaggcatttttaagctttggaaagggaagggtcatagtaatacatctttcacagaaaatttgaatttttttaacaacagataaacttctgttttgtcagaaatacaaattattcccctcagatgaaatgagcatacatgtgatagaaatagaagagacaggtctcttttcaatacttgatttatactgttgaatagaagaggtcaaaaaaagtaactgctatggtaagtatgcttgtcccctcctcccattaagtgtttcttcagatttaggggttgcttttgaatttttcttgccctgtatttcattaatatatactcagtttgtaatagaaaggaatcaagtttttaaaaacaatggtggagatctcatattatttcagctaccctatggtagtgaaactagttaaaagttgattatgatgtgacagtacaatcacttcactttaaaatatctgggcaattatttgaagatatgattatcagatgaaatttgatattaccgctggctttttttattcttcaacgacatctatctctggaggtatcgggttcttcagtaagttaaggaaggctaagatggtaggtactaaaatctttgtgatgtatttatggtttgttttaagattcctgttggtatcatacatattacacatactgatttgttgttcatttagaagaaaatgcttttacctgtacttgagtcatatattaaaatgaagctaaaatttaaaaatagggttaaagttcatatggcagtttcccccatacacagcacattctatctaaacagtttagttgtagctatttaatctgggtaaaaatgaacattctgttagccattcatattttttaccatttgtttgaaaccaaactaatctagtgctatgatttactcagattttgaatccagttacaaacaaacctagatcctcaagaagccaatataagatattctatctattactcttattagttattttttcaaagggttagtctttccatggttctccttactacccctccctttttggtaagatatagctgtaggaagtattacgttcataaattagttcctatgatgtgaatgtctgctacattttaagtgtggttttggaatgtagcattgtttctgttgtaggagagtttgatcagaaaaggcaaactccacaattttcacccaacatattgtaaacattttcacctacagccaggttgaaagaactttacattagatacccacatgcccacctaaaggtttttacattaacattttactgtacttgctttatcacagatctgtccatctttccatcaatccatcttattttttatgcatttcaaaacaaattcacatttttagttattgagggcagagctaatgaaagtaagttccgttcttgcattttacagactcaaaatgggaaaatcagtagcttacctgttctctgcaagttgtcatatttgtgtaaaaattacttccagttgatgatgctaaatacgtgctttaaacaggtgactagcctgattaatgccaatccttctttcactagtgtatttttttctaagtgtattcattcatccctagttaaatgagtgttctgcttgtgtttttgcttaacacaagccatgtgtatatacttaattttgctgtgtgtgtaaatttttttgcttatagcttgaccgtaattggcttgagtgtctgtggtgttgagtcccttcatcttgcttttgttcttagtgtcaacttgatgtaggcttcttctcactggactcccaaatcctgtggttttctgtcaaaattatgtgtcttctaaaagatcattctcattttaaccataaatgatcttaaatggtttgccagtattactgccagtaataaattagagaatgcaagaatattgtgttgttcgaaagcatgatgcagtagtattcattgagagaggtgaatctagccaaaatgcctgtgttgccctgaatttgactttttaacccataggacagttctataaaaagaacaaacagaagtttctttggtggtgtaatttaggatatagcatgaaaacaagtgaagctgactcgcaaaaattggagatgctttcaatgcaatttaattacaaaaggcatgtaaatttgatttttcctcatcagaaagaatcatgggtctttgagaatttgaaatatggaacacaattgcaggaatgaaggagatgaaatttaagtgacgttagtttgagcagataaattcctgctatttcgaatagcctctaaacaactggcagaatggcaaatgctagtgatacagctgctaccaagatctcattcaagatcccatttaactgtttacattttttagttggacagtttgtggttgttgatagcatgtgcttatatttgactgttactgatattacctgcttgatacttgagcttctgatactagaaattttacagatttttttcatcataaatagtggaaatcaatggttgcttaagagtttttgcctataagtgatgatttttttgaatcacttttagagcttattaatgtacagaggaaatattgactgcagattaaatttattttgtgaagttttttttttcttgaaagtttctcaagccatagttaatttgtagccatcaaacataaatttaaaaatattaggttggatacatgtaaggaaacagttctaacaactgaaatttcaaatacctaagtggggaatattaaaaatgtagtaaataagattgacttgtaatagtattttgtaggaataaagttgaaataaaagacaagcttaagtgttgggttatagttgacaagatgatttttaaaaatttcatctatcctgattatcttggtgtttatatatacatatgtgtgtgtgtgtgtgtgtgtgtgtgcacgtgtgtgtgtgtgtatatatatatatattttttttttttttttgagacagggtctgactctgtctcccaggctcgagtgcagtggcaagatgagggctcgctcactgcagcctcagcctcccaggctcaagtggtcctctgacctcagccccccaagtagctgggactataggcctgtgccatgacacccagctaattttttgtatttttagtagagacagggttttgccatgttgcctgggctggtcttgaactcctggactcaagcgatctgcctgcattggcctcccaaagtgctgggactacaggcgtgagccatcgcacccggcaatatttttttctttttaaaaacgttttatgggaaacataaattgtaacaataaaataataatgacagtaacaataataaatggcatcctcatgtacatcattcagtttaagaaatatatattgttatagttatttttgaatggttaagtaaaagtgaatgctgattaaatcaatagaacactgtacttttgaaggtgaacattctaggtgatatctattgcatactagagggattgaaattaataaaagatttagagaaaatcaagtaatttaatagaatttccccccaaaatgctgtattaggtacaagagctggtaagttcttgaaaataagatatagtagaattacccaaaataacttctttttttgggttatctcatttagtcctcaccatagcccttcgggacagttattcctattttatagacgtactataattcagataaattcagaaacttttgttcaaagtcacgcagccagtaaatggcagttataaaaattctccagctttatcttggtaataaatagattattaacatcattttaatggaatgttaatgtagcctgttgtgctagtctctagttaacgtatagcatgtggaatggcagctctgtgatcagtgccctagggaggtattccagggtcttcccagattgaatgattcctgactactgtacttggaggacctctagacttgtcttcactcatttgccaattattatcttgaaattattctacctctcactttgaatgatacatagttggtacattttctgatctttgtgcattgccattaccttcattagcgagttacgtgcgtgtctaaaagtatcttcgtggtctaaaagagttaatgcagtttccagaccacttgccattcattggctgaaatgactttatcaaacaatagttaagattttactgagaatgtaaaatagatttacctgaaaatgtggataggctaatattacactgccgggaaatagatctcagcctcagatctcatttatctggttatcttatctttttttcatctaaaatttatatttaaatagagatgggggtcttgccatgttgcccaggctggtctcaaacttctggactcaagtgatcctcccacagtagcctcccaaagtgctaggattacaggcatgagacatggtgcctagccaatctggttattttaaaagctcgatgttggttagagtaattgaactctctttaaagagtatcctgagatcatatattggtaacaaatttttgtcattgtatgtttgttttgaacactttgtcaagaaatgtcctacctccccccagacggagtcctgctctgtcagcccggatggagcgcagtggtgccatctcggctcactgcaacctctgcctcctggattcaaacaattctcctgcctcagcctcccaagtagctgggattacaggcattctccaccacgcctggctaatttttgtatttttagtagagacggggtttcaccatgttagccaggctggtctcaaactcctgactttgtaatttgtccacctcggcctcccaaagtgccaggattacaggcgtgagctacggcgcccagccaaaaaatgttttttaagcttatataaagaaggaaatattttgaaagtttatttatagatgatagaatatttcagctttggagacttatttttatttcttttgtcctatgttgaatatggtaatttgttttactgcttaaaattgtagatttcaaagttatttctaacaagtatcatctgtccagatgaagataataaccgaaactagttctgaattattccaggaatttgcagtcaaatgatacatctgtaattacatggtcagggtgaagtttttttttttccttaaagttgagggaaggtattaaagtttaggttaagaacctagggtgtagaagttaaggaggttagtccaaagtctggcccaatcgcttaccagctgtgttaccttagaaaagtgatttatcagttttcttgtcaataaaatgagagtcatacctgtactgcagtgttgttatggggacaaaatgaaataaatgcatggtaaatgcataggctgaacaccaacatgtgatgagtattcaatataagttgtttaataatttcaggacatgtcataaattttcagattagagtcaccttgcttccctacctttattaaaggcagtcttcaatggagttttaaaatggaaaagcattatcctgatttccattttgaggttaggcagatggtaatatagcattgaattattccactatttctggggttgacttggctagttagtggggtgtctcttccctcccttacctctcagatatacccttacataaatataatgtagttgaagacaggcttttcaaatagaggagcaattttcttccataaaaagcccattttactagccttttattggatgcagagtaaaacatcacttgttgctttcttaaatattagagacagaaaattatcaggtgtgcaaatattggacataggaacttgtactgatgatatgaacttctggagaactgaagtactactactttcctcctacactagttttctgtcagcattctcatctgcatcaggaatacaatatttattctaataggccaggtcattggtagtttacttttatcttaatgtgttatatcttctcatactccttttatctgtcctaaggactctctggagtctggtgctttcatcatcttcaggtttatagaccttcaaaagccttcttgatgtaaagttatttaattcatgtcccaaaaggtctgttggagttctataaccccaaatcagtggtacctatgaggtcattctttaggtgtttattttttaaattatttaaaaaatttatttaataattcttatatttcttttgttattatgagattattttgttcttattcccccctatgggtttattagggatctttattccttctgggtcatgccccgtgttttttatggttgtcgttttaaaatctttatttttctctgcctttcattttaatttttagatccttaattttatcaaccagtctccactcaacacattttcttgtttctcagttttcccaagataggcccttggtacagagtcagttattccaatatcttaagtttagactaggaatacaaaccccattcttcagtatcagccattcaccttttctatctgcctttctcttcccattgttccactcttcagttatataggggaaaaatatccgtacacctatatatctctctctctcccttttttggtgagtcttcagagatactgcccaggtttcttttcagcaatatcatttactgcaaaagattcagaaggcagggataattcttactgggtttaataaatcttagttgggtgctttggtcatcccaggtatgaaatccagaaacagacaaacaaaacaccataccaactgtcaggactacatttagctgtccctatactcactagcaggaagatgttagttgactgtaagaaatttcttctttctggtaacaataaaagcttctttaaacttggtgttacttgtggttccttttgttatttttcaaagcatgaattgctgatgcctttccagaaggtttgacaaaaccctatttgggagtccctgttagagcatcaggtttgaagtagatatcagaattgcccatgtatttgctgaattttattccttaactcaaatacttatttttgagcacctgttttgtatcaggcactcttgtggcctctgtagaaacaatagtgagctgaacagacaaaactacctctctctggatattccagtagaattaggtgaataataaattgcacattagaatgtggaaagtgctatgggggaaaaacaagagtaagagggaatagggtagaatgaggaggagggtggttacaatttaagtagaatgaggagagggtggttacaatttaaaacaagatgtttagggtcggcatcattggaaaggtgacatttgaacacagatttgaaggagatagaggtataagccatataaatatccagggggtgagcgttctatgtatagtacaaaggctctcgataattggtaataacacaaaaacaagcaggacgaatgaagacagcaatttcaaaataagggtatcttttaaaaaatgtttttaccactcaggtatatacctaagagaaatgagtatgtatgttcacacaaaaactcatatatgcttgttcatagttgtattattcataatagccaaaaggtagaaacaacacccgtgtccatcaattgacgaatggataaaataggtatatccatataccagaatattacttggcagtatggaccagcataagcaaacccacagtgacaaagtagattagtggctgctaggtgctgaggctgaggtataatggggggtgaccgctaacagagtttcttactggggtgatgcaagtgttccgaaaatagtggtgatggttgcagaactctaaatacactaaaaatcaccaaattgtatactttttaaaagagtgaatttgtggtatgtgaattatgtctcaagccgttataaaaattttttttctgaaaagttttttctaattatgtaaaaaatacttgctgacttagtattcacagtataaaaagatataaagcaagcttaaagaattccaactattcagtttgtattagcactttggtgtattttctacaaatttttttgtttttgttttgttttgtttttgtttttttggggggggacagagtcttgctctgttacccaggctggagtgcggtggtgcgatctcggctcactgcaacctccacctcccgggttcaagagattcccctgcctcagcctcccgggtagctgggattacaggcgtctgccaccacgcccggctgattttttagtatttttagtagagatggggtttcaccatgttggccaggctggtctctaactcctgacctcaggtgatccacctatgtcagcctcccaaaatgctaggattacaggcatgagccaccgctcccggcctctacaatattttttagagtgcatttctaactattaaggcaagggagaaatagctaagtcacaaaagaaataaccatatttaacttttattcaaaatgaagtaagtgatacagtattttcaaaacctatcagtctttcattagcagccagttccaacaatttatcctgtaaaattagctaagtttaccttttttagatgaaataaatggattctggattttatatactaagttacagtcaatgaatattgtacataatgtggtttcattgcatgtgactgttaggaggctgattccacgagtgagtcatcacacagattcaacaatcttgatctgttctatatcctgttcaaccagaggagtgcattaatcaaaccgccatagaagtttctaaacacttaatctcaatttctttactttccttgatgtggcttggaaacaaaccatttgcaactatgctttgagtggcactgttctggaatattcataaagtggaataccatatagccttaaaaataattttcttatagaataattacatggggaaaggttaacattctttgcaaacaggttaagcagtacaaatggcaatcttgtttaaataaggatttttctaaatataaaaaggaaggctaaaatgattatcttcagatacaaggacgaatgatgatttgctttctgaacattttagatttcttactgtggacctatatcacttttataatgaggaaattgttctatttttagaaacagaatctcactctatcactcaggctggagtacagtggcacaatcatagctcagtgtagcctcatactcctgggtttaagtgatcctcccacctcagcctcagaataataccacactactcaatagtgttattcagcccttctcttctgaaaagtagctaggagtgtaggcatatgctaccatgccctgttaacttttattttttgagagagaacgtctcactatgttgtctaggctggtctcaaactcctggtctcaagcgatcctcccacctcagcctcagaatggctggggttataggcatgagccactgtgccagcgagaaaattatttttaaattgccttatttatagtaggtcccctttgaagtggtagtgtcagcaaaatggccagcacttagtagctcaccaaaaaacttttggaactggtttgactcttggaaaatgtgtttaggtatccattgtgtgccatggcattatttggcaatgtcagatttaaagctttatttatttgacattttaaaaattctgtacactggggatgttgatagaggtcatttctggtcctcaagaaacacagtccagtgtgggagagagttggacaatcacaatatggtgctaaaggttatgataaagagttgaatagaccagtccccgtctttaaaaaccttatggtcttgaccgggcgctgtggctcacgcctgtaatcccagcactttgggaggccaaggcgggaggatcatgaggtcaggagatcgagaccatcctcgctacggtgaaatcccgtctctactaaaaatacaaaaaattagctgggcgtggtggcaggcgtctgtagtcccagctactctggaggctgaggaaggagaatggcgtgaacgcgggaggcggagcttgcagtgagccgagatctcgccactgcactccagcctgggcgacagtgcgagactccatctcaaaaaaaaaaaacaaaaaacaaaaaaattagccgggcgtggtggcaggaacctgtagtcccagctacttgggaggctgaggcaggagaatggcctgaacccaggaggcggagcttgcagtgagcaaagatcgtgccactgcactccagcctgggcgacagagcgagactcatctcaaaaaaaaaaaaaacaaaaccttatggtcttgtaaaggatatacggcaggctgtgaaagtgagagagcgatcttgctacctttcttaggggaatcttggaaagattaaagatatataacatgtactaagtgccctcatatttttatcttccaggtttgagcacaaaatgaacataattagggaaaataaggatctggcatgtttctacacaacaaaacattcatggagggggaagtaagtattcttgttgggtttttttttctgtgcttctataaaatattttaaacattactgtgtttcataatcttgaataatactgcacaactcaggctatacagcccttctcttctgaaaaacgtgcatattataaatgtaaatgctacatgtatttttttttcttttgacatttccagttttcagtatctttcttgggaaggagtttggtaagaattaaaagtgacagttaaaaggaaagtaaaccagttaatccacgctcttgtatgctatcaattaatgatgaggttatatagtagtagcagagtgttaaccctacatctttgttacccagtgactaacctgtctgtagccaacattttcatatccgtttgactgtcggagaaaatatgccattctagtgaagtctaacctttttttaggcctgtaatgaaatttaaaaattgggtttaatatattttctttgggagggagtgatggcattttttagtagcttcctagtcagaccaaaatgtaagtgcttctgtttcctgtctgtaagatggttggtaattcctacccttcagatttttgtaaggattaaatgaagtgatatggcatgtatgaaagttttaaaattatgcctcaaatatattgagtattcagtgaatggcatctgttgaccattacaaaagtttagtctctggtccctttgatcagtaataagtaaaatgagtgtgtcacacttttacaaatcagtgaccacattattctgaatcgtgccacaaggtaaaatgtgacacatgcacaaagccagtaagtgtttcttctctcaacttttcattttttagtcactggagtggtaacttcttaggatgtggtatacatctgagctgtctagtatttctggtttgcattagcaaactgcctataattttggaagatttgaatatttgattttgttgtctaatagctcaattgtatgaactcctaaattagaatagttgttaccctttagaatacttgtctctcattttttttccccctagttagtttcaatgagtgaagttagggagaaaagtggcatatccagggtagtatgagtcattttagttctttgaatcaaccttagaaaagtatatctttaaataatccttattttttcctcaagtggtagattactttggtcatcataatatgacttccgtttttaatatgattataacatactgatacattctaaagaacaaacttactgcaatgcttttcgatttgtgagcttgtaagtaactgtgatcatcaaaatttttggtaatgttcttagagtagtgactaagacttaactatcctcttttttcctcgtaataattcagagtacaactgtttgtgtgctcttagcgtaattcttttaggccttgagacttggttttgtttttataacagctttaaggcataacttatataccataaaattcacccttctaaagtatacaattcagcggattttagtgtattcataaagttgtaaaccatcatcactgttttgagaacactttcatcacctcgccttccctgcaaaaaacttcctctaaacactgcgttacaaatcagcagttaactccctttttccccctcttttggcaggcgttaatctacttcctgtctctggatttgtctatttggaacatcttatataaatagaatgatacaaaatgctgtattttctgactgacttcttccattaagcataatgttttcaaggtcgtctatattatagcatgtcagtacttcatttcattaatgtcatataatctgttgtatggatatactacattttgtttatccattcatcaactgacagacatttgtgttgttcttactcttttactattatgaataatgccactgtgaatgtttccatatttccagttgttttgtgtatatacctaagagtggaattggtgggttatgtggtaactctgtttaactttttgatgaacagccaaactgttttccaaagtagctgcagcattttacatttccaccttcaatgtctgagtcccaaatgctccatatccttatcaacacttattgtcttttttattttagccatcctagtgtaggtacgaagtagcttctcattgtagttttgatttcatttccctagtgattcatgatgttgggtatcttttcttgtgtttgtaggtcatttgtgtatcttctttgatgaaataatctattgaaatcatttattcactgtaactaaaaaaattttttttattttacttttttttttttttctttttgagacagagtctcactctgttgcccaggctggagtgctgatctcggctcactgcaacctctgcctcatgggttcaagcaattctcctgcctcagtctcccgagtagctgggattacaggcacatgccaccatgcctagctaatttttgtatttttagtagagacagggtttcaccatgttggccaggctggtctcaaactcctgacctcaagtaatccgcccgcctcagcctcccaaagtacagggattgcaggtgtgagccactgcgctcagccaagtcatttattcacttttaaattaggttgtcttattactgaattgtgagagttctttatatattctgaataaaagttccgtgtatatgatttgcaaatattttctccaattcttcagatttttttactttcttgatggtattgtttggagcacaaagcttttaatttgatgaaatccaatttatcaattgtttcttttgccatttgtgcttttggtaatctaaaaagccattacctaacccaagctaacaaagatttacttctttgttttcttctaagagctgtatagctttaattgcgttaatttttgtatttggtgtgaagtagggttctaaattcattcctttgcatgtgaatatccagttgtgccagcatcatttgttgaaaaaactgttctttccacttgaattgtttcgacacccttgtcaaaaatcagtttaccatgactgtttagttttttcctggactcataattctgttctgttgatcctgtatgcctaaccttatgccagtaccatattgtcttgattattatagctttgtgctgttttgaaacttagaaatacgagtctctgaattttatttttcagtattattttgggtattcctggtctcttgcatttccatatgaattttagagtcagttgttaatttttttttaaaagacagctgcccggcctgaccagcatgatgaaatcctgtctctaccaaaaagtacaaaaattagttgggcatggcggcgctcccctttagtcctacctacttgggaagctgcagtgggagaattgcttgaaccctggaggcggagactgcagtgaacagagatcatgccactgtactccagcctgggcgacagagtaagaccgtgtctcaaaaaaaaaaaaaaaaaaggcagctgacagtttggtaggcattacattgaatctgtagatccattagtggagtattgccatcttaacagcattgtcttctgattcatgaacatgtgttttcatttatttacatcttttaaaatttctttcaacagtgttctgttgatttcagtgtatacaccttgaatcttaacttctccctgaaagagtttacattttccagatggtgatagttatcatttcattgggttatatacattattaaatggcactgagactttttattatacttacctattttatatggccaattctaatctaggtttaaagtactcatcagcagtgttaatgtaaaaaataaatggccaacattaaaattttctgttgtttcagaatagttaattgaaccttgtctctagaaacatgtctacgtacaacaaattttttgtgatttttgggatttagggcctcagttttaagagactccatgcctatttccgtgttgctaacctagccccagcatttcagaaagattttattgattgtggaagtaaagatgtataaatattttttcttctcttcatatgtcaaaattaagataacctgtccaggtattccccttgaagatatttgtgtgacccatttctgttacctttgtagtagttttcattattacctcactttatagctgctgaatgcctttatttagggtctgttgatcatcggtatggatgccttagctggcaaagtagcttcttctgcgcttttcatttttccaacttgtatagacataatttaattatatgtttattctgggaggagcaagaaaaggagagtagattcaggggggaaaaggcacttttctttcatgaaggagaaaaatttctgttttggcctaagtaagccatttcagagaggaaggaaagttcagatgtttcagttaaagcagaagtgcagattcactgtggaaaaacttcagagtgatattcaaggtacaggttctcaattttttctggataaaaatttataagtaaaatctacctgtggatcaccttaatattgcatacattaattgtaggaaatgctgtgaatttagagtatcattttggtatctaaacaggattttcacctcaatgcattaggatatgtaatgatcagtctatgaaatttaataacagaagctcactacattcatagtttctgtaataactggatacaggaaattgagagaagtgctgagacaaagggaagctagtgaatttctaatacctttcttatatgtaggaatggagttctacaagagaaaagatatctttttcttttgctgcctggcatttacacacctcacccatcctcataacctccaggaatactgaggggttttttttgtttttttttttttcccctcgctcttgaccctgccagtctttaaaactcagatgagctgtccttaattcttttgtgttttctttgtctaattttttgtgactatcatcaggcaacctgggacttgaacatctcttacctagaattgcaaattggatcacatctcctttatcggaatcttatgtttttcacaaaatgttgtgttgaaagctagctccatccgagctggaaaagatacagacattgcatcatggaatttaaggccttaaaatattacatttcatgggatgcccttttatttcttctaaagctcttactgagcttttaggacagatatttgcagagtatgtcctatccatttcttctttttcttttctgaggagtacaactttttatctgaatgagccctccttggtgaaactgatgtttcaagtcaagtttccactacagagtatcctggcaatacaaccagatgaacgatcagtttgcccattaattttgttctttgttttgaatatgaatacactagagcagtcatgggctggacgcagtggctcacgactataatccgagcactttgggaggccaaggctggaggatcacttgaggtcaggagttcaaaatcagcctggccaacattgtgaaatcccatctctactaaaaacacaaaaattatctggtgtggtggcgcaggcctgtagttccagctactcaggaggctgagatgggagaattgcttgaacccaggaggcggaggttgcagtgagctgagattacgccgctacactccatcttgggcaatggagctagattccatctcaaaaaaagcagttatggctactttaaaacataaatgtactaattataatttgttcagttattctactggagttttgggattccccactctccgttagtcaactagtggaataatagcaataggaatagctaacatttattgactgttatactcattagccaggcacataagtgccaagtactttacatggattatttcttttctcacattgtgaagtagatatacagtcatgtactacataacatttccatcaatgatggactgcatatatgatgatcccatatgtttagatacacagatatttaccattgtgttacagctgcttacagtattaggtacagtaacgttgtacactaggagcaataagctataccttgtagcctaggagtgtagtaggctatactatctaggtttgtgtaagtacaaaactagtaatttacatacagaattttgggaagaaatctgtgatagtcacataatgatgaagtcacctaatgacagattctcagaattgattcccattgttaagcaacgcatgactgtatgtattatccatatctttcagtcgaggaaaccaaagcttagagaagttaaggaagttatcagagaaaacacagctagtgagtagtccaggcaatgtggctcgagttggtgtgcttaaccattaagctgtagtgcctcctttaccaatgctgaccattaatctcctaagaaatgttgtaggtcagttatccttaatttcattattagatggactcaaattttagttcaagttactggattctcaagcttttaatgataaaaggaaaaatcctgggttccatgagtatcctaaaggcttcaagaaattggtggccaaaacttgttttaaaatggccaagggaactaggatattcagcctaggaaaaagaattcgaatggaaggtctgactggcagaagaattaggtatgctctgtgtgcagctgaaagacagaacttgggccagcaggtaaaatttgtggggaagtagatgttggcttacttctagggaacagttgtcaatatctacaataccgggacatgaatagaattgctttcagttaagatatgttagtttccttgcatcagccagtagtgaacaattataactagacaaccttgcctacagtattataaaggtttatgctgtgtgttatgagatctagagtgtgtaacataaaagctgtcttctaactttgattagctctgtttggcttctttgaagcctgttggcgtagattctccactgaagggattgaggatcttgaactttaaaagtaatacaggtacacagaaattttccgacgtcaagaatttgagaaccattattttatagtaaacgtaaactttctcagtttacaaaaatgttgaattttctctattataatactgaattacatggattttctgtgcagaagaatataatagatgttatgatggcgaccagtatttttgtagtatctctgttgacactattttacatgcctgattgatagaagctagttaaatattcgagtcagaaattaactttgagacagtgacaagaatcttagctcttattactttgaagtttatttcagatgtttgaattagataactagtaaaatgttgggaggaaactgagtctttaaaggactcctattcactgtcatattattgaacccagcacagtgtcagatactcatttaatccattatagtacctaatagagtatctgacctaacacattggtttttttttttattttgcctaaacatgtaaaaaaatcttgttataaaataccttatgtaaaaaaaaatcatgctataaaataccatatgtaaaaaaaaatcatgctataaaatgccatatgttaaaaaaaaaaaaaacatgttttaaaaaattgttggtttttttgtgtgtgtgtctttttcaacatggggtctgccatcttgcccaggctggtcttggggctcaagtgatcctcccgcctcggcctctcgatgtgctgagattacaggcgtgagccactgcacccggccacaaaaattgtttaaaagaggaaagcagtattcataagaactagaaaacttaagaatgctgtaacatttttattttcaggaattaaaataatttagaagtgttttgatgtaaattaatatgtttaatctgtctgttaaaaaatataagcatcaccttatcaaatccaaaacttgattacatccccagcttttgcctcagtggttttcctgttcagatgatcttatctccaccaatactatcatcagcacaacatttttttttctttttctttgtcaccaattgcaggggagtaaaatgccccacagataaagcagtcgcctcaaacacttgtatttctttaagcagcatttgtttcctgattctaaataacattatacctaatggtaacataagttatgtttcttaataagctgttgtattacaataagcttgtgagttgtgataacttaagaaatgcctacttcttgtaggcatttaatgatgtaagtttagtgcctgaataaaaagaaaacaggtgcagtaggtaaagtcaatatgaatattaatttttcagttagggggcaaaggtcttttttctgatgttatactatgaatttaaaaattggtgtaaaattacttgctgtctgacattctgctttaaaggcaagagcaggctaataggtcatagatttgtatgttgacatatttttggatagattgttttatctagctattaagcatttattggggtatctactgtagtcaatgctgggtactgtggtaggagttagcctcaaagaagaagacttgtgcctccctgaatccgtggagtctttgtctcttctttgacttgggacactgttgacttagtaaaagataaaaatcttttttttattttttttgagacggagtctcatctaggctggaatacagtggtatgatcttggctcactgcagcctctgcctcctgggttcaagcaattctcctgcctcagcctcctgagtagccgggattacaggcacccaccatcatgcctggctaatttttgtatttttagtagagatgggtttttgccatgttggccaggctggtctcaaattcctgacctcaagtgatcctcctgcctcggcctcccaaagtgctgggattacaggtgtgagtcattgtgctttgctggtaaaaatcttttagctgtaaatgttgtgactaatattctatacatgcgagacattttagatattttcatctctaaatctgttatctaagggggctttttagaaaatcattgaaagtttagctttgttatccagggaggcttttttggtaatctttggaagttcaagcttgcttaaaaagatgtcttaaatgacatagaaatatttgccccatccttaagcggaagttcaacagccactctaaaaagaggagcggcatggggagtacttaaggaagggagtgcggaggggaagggagttctcttaggaattttctttttttaatagctttcttaggatggcttaaagatagctccgtgtttactagttatgacagtactctgctgggtctagcatgcatacaactccaggatccttttgctgagggatccagaatgtgatctctccagtatggtagccgctaactacatgtggctatttatttaactttaaataaaatgtaaaattcagttgccttagccacatttcaagtgctcaataggtacactttgctcattgctaccttattgcaggggcccccaagcccaggtttttggcctcttaagaactgggccccacagcaggaggtaggcggtgggcaagcgagccagcattaccgcctgagctccatccacctcctgcacatgagagggatctaggttgtgtgctccttatgagaatctaactcatgcctgacgatctgaggtggaacagttttatcctgaaaccatccccctgccctgtccatggaaaaattgtcttccacaaagccagtccctggtgctaaaaaggttggggactagttccttattggacagtggaaattttgccatgtcagaaagtctttcttattggacaatgtaggtctaaaatattgtcatctcaaagttcttttgacagtatgatctagatgacagaattatatgagaaagatattagaagaggcttaggtgtggtggtgaagattggtgtaggattgaaaaggatattttcttagccagtcttctaagactgtacatggcaccagcagttacatttggaacatttcaggcattctttcactttttgctcacagaataaaataaacaaattctgtagttttatttcaggattgtaaggagtttcatgtttgactttcagggtgattttgaaaaatagtttgtgaattcacatctcttatcacacatttgatttcactgtgcagcttttaagtcaaagactgagcaaaatcttatttctttgttttagttcctattaattgattaagcctttgaagttttgaaacttttaagctctttagatagcttgtttacttcaccagtcccctaaccctcactccactttaaaaagaagcaaatgactgcttttttgttagagggaagtgctataattctttagtttctcactccactttagacatgtagagttaggaaaaaaaacacaatgtagcaatacttttgtatatggatatgtggtaaagattaataaaatcttatcatttcctttttacctaaatggaaatactttctcatttttataatatactgattttaaaaaatagacaagagaaaaatgaaaatgtgaaagatctctcttgatcttaatgggaatacttttattgtattacctttgagtctgatcatggctgtttgtttaagttattaatgcctttttagcatactaatagttcaaaggaagaaaacatgattctctccgtagatgtcaaaaagacatttgatttaacttaagcatttttgataattaaaaaaatctcgtattaaaatacaactagatatttcaataaatataacaaattatgttaatagatttttctaatattgaagtgtttacctaattggtcacggtgtattactattttaaaatgcgacttgattgttactgctaatattagctttgaaaatagattggtgggtttttttcttattgtattgtcttttcagattttagtagtattaaaaaaattgagaagctgtttttactcagttttcggcaacaatttaaggagcatgggagttacttggtcctcaggtttcttctgtcttgaaatcatttgagcctggtgcttttggaggatgtaattctttgcagctttcttaaattcttcaatataagggttgatttattcttatattgaagggttgattttcaaatttgtcagcatagagttatatgcagcattttaaaaaacttttggttgtgtgaagtctttgttttccttaattttgttttatatatactaatgttttatccattttaatattttatttccaaagaactaattattttgctttaaataagtttttctaattcaatttccttttatgattatgaattcctttctcttttgaaggattactgatacccaaatgttttttctccttcaaatatgttacttgaaaggaaatgaagtgagaagtgaaaactgcttgtttgtggtgtaggcttcctacttctataaaattgcaacactgagatgtaataggtagttgcttaagtagaaactattaagattccaggatatggctgtgactgaccagttgccccaggccatagcttttccttcctttccatatggctttgttgtaagggtattttgaaagcattggtatgcagtgttttttttttttaataaaactttcccatttaggatctttcagcatcctcagctgatgctttgccaacttaatttatactaacaacacacaagattgcttgcatataaatcatacttttctacttagatatcttaatagttcacagtaaaatgagtgggtgggttttaataaaaataacattttagaatgtttaaaaaggtgagaatatataactaagctatatttagtcaccattaatcaactaacacatttctatgtattgaactgtttgttttgtgttatatatattttcttataaaatatctttttgtttaaaactaaatttaagcacttgttttcctttgtaggtataagcgtgtcttttcagttggaactcatgcgattactacatataatcccaataccttagaagtaacaaatcaggtaatcctgttagaagctgttaggtgtttgtatgaactccctttgaattttaaaagccaggctgtgaccattaccctcccttaaatcagtacttgaagatagaaatgtcaaatcagaaagagattgatgtgcttacataatactctgatttggggaccaaaaataaataataaataaacaggagggggagaatatgcttatttctaggctctcaagggtataacttgatgttactattagttgtggccacctcctttatgtaaaattagtaatttagttctctataatttataaaggcttatactttttactgtaacaaaagcatatataagtcatgagtccagttagtgtaaaatactcgtcatgggagtaggattatgggtttataaaggcaagagtaacctgaacatttataagtaaacatattcaaagatattctggcctattttaattccaaattaggcatgtttcacaaactttttaacaaatttttaagtagtcataaaatttcacttcccagttcttatcactttttaattttaatttctttggattaatgtcatcattaaaataggaatacatattggatttttctgactaaaaacctttaaaagaattttttacagaattactgtaagacacaatttctagactctattttataaaattttgctgatttaatcagtgattatgaaattaaagtgacaaaaataagcattacattttactgtattatagtagcaccagtcaaaatttttttttttttaagtggccttatggagacatttgcagcatcagccctgttggaaaaggacaaggaacggagttcaacctcacatttcgtaaaggcagtggaaaaaagtcagaaactttaaaattttctacagagcacagaacagaacttcttacagaagcattggtaagaagattccatgttcataaataaaatttctttcttctctttttaaaatgaagtagttacatagaagtagagaaattaatgttctctgcccctgtacccactatgattatttttttcttactgacctttaacttgaccctgtgaaacgttcacttttctctaacaggctggaaaatcttttatatttgcaagtttattagttttttttaattgcatatgcaggagaaagcattgtatgtttatcttgttcttcaataaggtttcatactctttttattgaatattcttaaactataacttgaataacagtttttagtgtccaggttaccaagtcaggattttacttgctttgagtagaagggagtgagccaagttttccttaccagtctgttgtcataaactgtggttatgttttctctttcagagatttagaactgatttttcagagggaaaaatcacaggaagggtaaatatttaacatttattatgtatttttatttgttcaaatgttgccctttattgtagaaatcatttcataatctgtgtgttccatttgtagcaaagctaaagggaaaagaaacaaaattgtaatgtctcctgatatcatgttatgtagtttaacaggaaactcaaatatgaacagttagatttaagaatgttgatactggtagatggggggaaaaaaaggcaaaaaaacctttggagcattaaaagcaacactataagcattcaggtagtccttatgcagtatcccaaacagtaataccagagaacgtcatactgctgatagtgcatgttggaacattcattcattgtttggtgtaggagtttcttatttcagaaatattcaagttttaagatttgagcatactgaaactgtcttcttacatgttcttggactggatctggcctgtactgaagcttggcatggtgcactgacagctttggaggaagctgtggtggcatatcagagtcgtcttaactttcccaggccttttccagtaatgtaacagcagcatttaaactaaatcagagacttctgggaaagaggaacaggagtgtaaccttttttcactctcttgagatattaaatttcttcccattagcaagtattacttttataatggagaaaaataatgcttaaatttatagcactgttcagaaccctagcttctggcaaaaggcaggaactgaattctgatatgcgggcagcaccattctcctgtctgtcttaagccctcattcatagaatatttctatgaatattctgctactttttttagcatcccagaaacctcactaatttcaactctagcaattggctggttgcccagcagcgtttaaaaatagtttaatggcaactggcgagctgcttatttcttgttcctgatgagccatggtcaaatttttataaatcataacttggtgtgcttattttaattattctatattgtcaggtgacgtacctcatctgtttgggaaacaactgctttcaaaagcatacttagaatttttatataagctgtcttttgtaccagttaacttcagccatttaatacttttcaaaatcttgtggtagaaacagtacctctagaagattgcccaaaggatagtttacctgattttacatcaggagtaaggggctcaaagtgacacctgtattgtcctaataacaagtttagattccaccccaaatactgtgctggctaaacggcactcttcttgcctaagttgaatttggctctaagacctccatttgccctagatatacttctaaatcagggtttctcaaaagtccttcttggttggcccctgcaatcctgagggataatgatgcttccatcagcacatctcattaatggcagttgtttatgagctgggaggaatggagaatatcctatatagtggtcttgaggcatgtaaacaagtatagtttggaaagctccacaatttttgtgccctgccttctcccattcctgcagcagaggtgtggcattgactgatcttttggttcagaatcaaggttctgtattcttggattagtgcaggcccctttgtctgtctgcataattacttttatggaactatgtgtgtgttcgatgcatagatcagtaatgttgaggagacttgatgtcctgtgaaagtcattgctgacttcagtgttgggatattagtggaggtgttcattacttagtgcttcactctcttttctgaaaacctagaagataatttcttatttcagtatcagaaatagttgtactccagagcaaccaattgatttttacattaaaaattgtaattgaccatgtatcccactttatattgatgggtagaaaactgcggtgtttgggtgggggagaggatactcatttcacatctgaaactttgttatccttattttctctttgcttcagttttctattattttaaatttattttcttcttccgtatcgcatcattttgcttagcagccttgattaaaccttttttctttttaaagactgaaactggatagtaaatggatattgactattctaataatttctgacactcagctactttaatttgtgaaggaatattatctaaatggaattttacttgctaatatgatcaaacatcttgaagataactttccagttgtgtgattagaaaagcctaaggtcaaatacaggcctcagctttttttttttgtatgtggaaataaaatatacattaatatactgaggcggttcaggttgtttaaattgaatattacaacttccctgaaatgtgacttagctcttttcattattgaacttggattaaaagaatccatcaaagaaagtagatcttttttccagtaaaactctttcagaatacatttctatgtaggatttcctcttttttctttttataaatttacatagagtggcttaaaatagcttcataaaatattgtaacccaaaccctttgctaattaaaaaagaatgtactgtcttcagttagtgtgaacattcttaaacacctccaaatagttaaaattaatcatagttttaacaatttggatagtagctctaaatatttacgatgacagttagatttttggtcgtttcaatagtgactgtgatacattaaattttattttatatgattttattttatgaacctaaaagtaatactgattctgtctttagagatacaactgctataagcatcactggagtgactcaagaaaacctgtaattttggaagtaactccaggaggctttgaccaaattaatcctgcaaccaacagagtactctgttcctatgactatagaaatattgaaggatttgtagatctctcagattatcaaggaggattttgtatactttatggaggatttagtagattggtaagtactattttaaaaaaaaaaaacactttaaaagggtcatgaccatttgaaggaaagcaaagctttttatacttcattttgaaatttcacgtgagtcctctggaaggaagtataatagtccaggttttggtatcaaagatacctgagcttgaatcccagtttgctgctttccaaaatgaggagagtgaggatctggtgagataatttatgtaaaatgctttacacacaatggatggcttagtacggtaaacagtgactacagttgttattttcattggtattactgtcttaccaaaaagtttctaagctttctttgaaaaagtaatttaagcctggcatggcagctcacacctataatcccagcacttagggaggcagagttaggaggatagcttgagcccaggagtttgagacctgcctggcaacatagtgagaccttgttctgcacaaaaaggaaaaaaaaatgaaaaaagtaatttaaaatcacttactttttgagaatctttcatcctttgcctggctgtttataatctgaaatctgagtatgcattgaaacttcaatttggaattcattgcgtgtttttgttctgaaattcagaattatatataagtaaattatggggtataacagaagctacttaaggtgctgagaaccctgttaatcagtaatagaagctgaagtatatataactatttttttttaagatacatcctgcctttctgtctcaaagatgtgcggtagagaaagtctccaaatggagagactcatttgaacttaattgcaaaattcctttctcttgaaaattttaattcttgtagctaccttagtgttccgggaatgctccttcaatttttagtgttttgtagataaaatatcgttctgttggtagcagagccaaagcaagcgttgaacttttacatatataagatagtagatgttagcaaaagggaaataaacaatgatgggggctagataatctgatgtagaaatatagttggttcttcagagttacaggcctttttccatcttagattttactctttccccacttgatgggtaccatcctagtttccctcatctaggaacatacaggtaaacctctgtgtgttacctctgaggcttgacccaaaagatgaaggcccttctcccagcccaaagcctgctgtcttagtgctatccatagactgtctcttccctggtcagtggtaatttggaatgtttaacatcttgttggtaaagatacctgattacaagaatatggcctgtcaggccttaataggataactgtatcacagtaattcaaccaagccataaaatggaataataaggtaaacgttaaggatgaaaattgtttcatactcttcttattgccaacattttgtattacttgggggcagcaagaagttttcatttgaattaatccactttctcactgtaagacactagctaaaatgaatcaattcactataaatatggtactataccagatttattcaacaaacctttatctaataccttttgcatctatggtgactataaaaagctgctaggaataaaaccaggttcttaaacacgatgtgatccagtgtttctcagcaggggagctgttgacattctgaggaggacaattctttcttgtgtgggacactcctactctgccctttacaggacattgagcatttctggcctctagacaccaaatgcaagttcaggttgagcataccaaatctggaagttcaaaatgttccaaaatcggaaactttttgagtgccaacatgatgcttaaaggaaatgcttgttggggcatttcagatttgggattttcagatttgggatgctcaactggtaagtgtaatgaaaatattccaaatgctgaaaaactctgaagtctgaaatagttctgatcccaagcatttcaaataacagatactcatcctgtagcctgttcccttacctttgtaaatagagcccagaaagttggtttgtaacatcggtaggccaatgacttgtaaacatttaaacattcttcagcatcatcttgcaaagaagcctactgtgtaaaacagattaaatcagagctgcgttgtttgaaactgggaatcctgcccacacagtacccatcacccccagtggcttggctggggttccttggaggcccttcttggaagacccagcatgctgttttgcacaaggtgatgagaaccagaacctgagaaattttgagataattgccgttcagtgagttagttgcaaagctctgtatcccagactttattattttaatttagtaatagtcttttcattgaaacaactgcttatttgcctctaatacctacctcttttttctctagaattgctactttaatacctttcctatgagttgattagctacagacacatttcagttgtttcaactctgactttttaaatttctaaatttgtgcagcatttatttgcgtcagagcaaagagaagagattattaaaagtgcaatagaccatgctggtaactacataggtatttcattgcggatcaggaaagagcctttagaattcgagcaatatttgaatcttcgctttggaaaatacagcactgatgaatccatcacatctttagcagagtttgtagtccaaaaaatatcacctagacattcggtaagacccatatgttaaaaatgaaaatttgttcacctgattttgacgttttaaaaaataacttcttaatatgtctcaattttattttttgaaggagcctgttaaaagagttctagcacttacagaaacatgtttagtagaacgtgatccggcaacctataatattgcaacattgaagcctttaggagaagtaagtttcagcattgttagcttaaatgagatttctttctattgataaattaggataattttctttctattttaatgtttactcatggctaaagaatatggaatggacagaatctgtatttaactcttaacatatttatattaattgatcatagaacaatgattattacaaaagttattttccaagtatataaagaatggaacttattactcaactgaaaatttgagattttaaagttttaaactcttatattgtaaacaagtcacatcttaaaatactgacttttgtaagctaagtgatgcattttataatgaaatactataaaactataaacttttttttgttgaagctattttttgttttttcattaggtatttgcgttggtctgtgactcagaaaatccacaactttttaccattgaatttataaaagggcaagtacggaaatattcttcaacagagaggtatttttttttttttaagtttttgaaatcctagttgtgcaaggcaaagtgcttggtcaacaaggaaaaccaaagatatgtagtctagaaatttaaaatcatttaatttgggaaaagacattttcttgcatatttaaaatgaccctcccattttcaatttttttttttttttttttttttttgagacagagtctcactgtgtcactcaggctggagtgctatggcgtgatcttggctcactgcaacctccatctcccgggttcaagcaattctcctgccgcagcctcacaagtagctgggattacaggtgtgcgccaccacgcccagctaatttttttctttttttctttttttgtatttttagtagagatggggtttcgccgtcttggccaggctggtctcgaactcctgacctcaagtgatccgcctgccttgacctcccaaagtgctgggattataggcatgagccaccacacctggcctataactagtgtttttatagtatttccagtagtatagtatgaccaatagctgtttcttgccttacaaagctttcagtctaaggtcaacaagactgaaatgttaagcaatggttatgtttttttcctgtcctgaattcaatggaaaagaacaccttaaaaaaaaaaagtatggatgttctaatcagaggaaggatcttaacactctgtttgtgagatgctttatgtacgttatcttgctttgtcctgacagtagccgtaggaagaaggtcctcttattcccaataacacttacatgcagaaagtaaagcaacttctttgtgacttggggttaagaaaagatttcccagatgtaataccaaaaacaatctagaaaagaagaaaaaaaggttgttagttagacttcattaaaatttagaactttgacaccatttagaaaaagaaaagacagatcgcagggagaaaatctttgcaaagcatatagctaataaaggttttctatccagaatatatacagaactcttacaactcaatactgaaaaaaaccaagcgacccaatagtaaatgggcaaaagattgaaatagacacctcactggaaaaatatgaatgttaatacatgaaaagatcatgaatctttaggaaatgaaaatgcaaactactacatattcactaacatgactaacatcaaaaagactgccagtggcaggtgttggcgaggatatggagaaaagaactctcatacattgctggtaagaaggtaaaatgataaaaccagtttgaaaaacagtttgataatttcttaaaagattaaacacatacttatatggtctagcagttccacttttaggtatctatccaagagagatgaaaagatgcccacagagagacttgcacatgaatgttcgtaatatcattactcatagccaaaaacagaagcaatccatatctagatcagccagtgaataaacagacaaaatgttgcctgttcatacaatggaatactactcagcaataaaaaaggactgacctaatacatgcaacaacttggatgaatctcaaaagcctatgtatgataagtaaaataagcaagacacctaagactacatattctataattctgtttttatgaagtttctttaaaaagcaaaactatagagatagatcagtggtttcctggggctggggagtgttcttttgcaaatgggcacaaggaaattttttggagtgatgaaaatatatcagaactgatgatgattatacagttgtataaatttattaaaaattatcaaactgtacgttttaattggatgacttgtgatttgtcaattagaaccgagtaaagctgttaaaaataattttaaagggagagaaagagaaattaaaattagtgtttaagtaacttgtacaaggtcatgtagcagcacggtgaagagctagtattagagctcttcctaaagccccactgtttgtgtttcccattgtaactgtagtgtgtccctgagcagattacctgctaaagggcctatgcttcatgctagatcaaaattccccttaatcatcaatgctaaaacctttttttacttttaatcttacttagagattccttattagcaagtttgctggatggagtaagagcctctggtaatagagatgtttgtgtaaaaatgacaccaacccataaaggtcagcgatgggggttactcagcatgcctgttgatgaggaagtagagagccttcacctcaggttcttagctacgcctccaagtaagtattgatttaaatgtaattacatttccactcatctacttaatttaagaattaggaattcgtatcttctttttgaacctcttaatctctttacagatggcaactttgcagatgctgtattcaggttcaatgctaatatttcatacagtggagtcctacatgcagtaacacaagatgtaagctaagttttatcataattgttcattgttactaacttttggtatggaaacttttttgaaatactctttcttcacctagggtctcttctcagaaaacaaagaaaaactgatcaataatgccataacagcattactgtcccaagaaggggatgtcgttgcttcaaatgcggaacttgagagtcagttccaggctgtgaggaggcttgtggcatccaaagctggtttcctggctttcactcagcttccaaagtaagttgtcttctgaaacttaacttctcttagagaatttgaactactcaaaatggcaaataatgaacgattcacctccttttccttgactaaaccagataccttttatagggtgatatggtactttattcatgagaaatgaaaaaggaaggtgagggcagcagaagcggaatattggtcccatactcaccagtaatataactgactcttgaatttgaatgggaaattacatgccttttagttttagttaaccctaaaaaatattttccctctcaaagaaaaaactattatgaagactgataaatttcagaggtggaatttaaaatacgtcattgttccagtagtgcaatggaaagttaatatgatctatttcaataatataacaatttaaaatgttctggtattgctagtatatgcttgttttttgttccaaaaggtttcgcgagcgtctaggggtgaaggtagtaaaagcactcaaaagaagcaacaacggaataatccatgcagcagttgatatgctttgtgcccttatgtgtgtaagtagtagttttcttaaggaaactggtttttcttaagttgactggtggttttgatttccacagtcccagattttcattgtaccaataagttcttgtttctgtttcataaattgttctcatagttactcaaacctttgtttagcatatcctaaataccaggcaatgtgctgtgtgccagaaattcaaagatcttaagacagaagttcttttcttcctcactttgttgacagtctggtaaggtaggcatatctgtacaaggtaaggtagtaggggccataggatcttgaaaagcagcactttatttttgtttggtgatgaggggaagatgaaagattctcacccagtctttctggaagatgttacatttgatctgaatcttgaaggacaggcaggaattttctagctctggaaaggccttcctgggtggggaatagcatataaaaaggcatgtttggaaagcaacaaataattaaatatggttgggttataaggtatggatggggggtaattaggagttgcagctagagatgtatgcagacagtaataaaaaaccttctgtatcaggagggaggagctagatttttatctttttgtaaggaacacctgaaggattttttttagcaagagagcagtaatgtgatcaggtttgagtttttaaaaacccacactggtagtatgtggagaatagaagtaaaattagaggcaggtagaccaaattgtcacgtaagaaatgagttgctgagctagggtagtcacagggctaaagaagcagcacacctgaaagctgtttgcgcagtaaagatctaacttagtggcagcttgtacagagggagaaacaattgtttagtacagttttgaagtttctgattatctcagttttgtgtgtagtacctgggacttttccttatataaagtgttttaggcaagcttagtcgtacataaacataagtaaatacttctgtaaaaccttgcattcccaaaagcaaattaattttatttactgttccaaacaagtagtgagataactagaacttaacaatgatatggagagttgctttattcgaacaaaagatgttcctattacccaggaaattctaatggtagagagctttgtgtcaggctcccctatcaggaaattgcaaagttcttaggagctctgtgtcaggaaccagggtaaaagactgttgcaacaaaagattctgctagtgcccctgtctgcaagggttttaggtgctctatgtcaggagccaaggatggagaccaatgtatatattttttaatatttcatgtattctccctgctcagaattctttccctgcttattcattaagagctcaagtcagcttttaaatgaagcttaccaaatatacacacctactatgtacccacaacaattaaaataaaattttaaaaataaatggagctttcttattcctgaaggtggtagtgatgtatccctccctgaagtgagattacccttcataaatattacacttgtctttcttagcaatttcttctttgaattattgctatttctaaacatgatgtatttttctcaatctgtcagcttcctgaggataatattcatgtttaattttaatttttatccttaacaggccttgtcaagctgtttaataaataatgattaatttttttctgtgtttcaggtactattctatgaatttttcatatattattcagtcttccaatgaactttagaagttattactgttatatctattttgtagagaaggacttaaggcccaagtaacttgttcaaggtcatgtagctagtaaatggcagaggaggcttcaagcccactttctggctccaaagtttatacaattaaccatagtaacatacagtatttgctaaatgagcagaaacaaaaaggaaggaaattctgacacgttttgcaacatggatgaaccttgagaacatgatgctagtgaaagaagtcagtcacaaaaggataaatattgtatgattttaattatatgaggtcaaattcacagaaagtagaatggtggttgccaggggcttgggaggaaggcagaatggggaattattgtttaatgattacagagtttcagtttgggaaaatgaaaaaagttctagcgatgggtggtggtgatggttgcccaacaatgtgaatgcttaatgccactgaacagtgtaatttaaaatggttaagatggtaacttttgttatatgtagtttaccacaataaaaaaaagtaagaaacaatgctatgaaacaaacattgagccctcattacatattaggtgttggctttgtatcttacatgaattatctcatctaagcatcatagtaatgttacataaatactattactcctactttacagctgaggaaaatgaaacttagagacttatgtaaagtaacttaccttgcgtaacgtctcccagttattgtcagtagtaaaattaggattggagctctactcctaaccatcacgctggaatgttttatacactcaaaagaaaatcaccctgagacaagtatttgttgttaattttagtacatttaaatgctaagttttatttcaaattttagttataaaattctgggtgggcaaatgtttgccttttaataagatctgtgacttttgagagagtaccttttgtatatgttgagttaattgttgggcaaattatctgtgaagtctgatcaaaatcatggtaaatcgtcacttctgcctgcttatcacgagtttcctttttgccttacactttaaaggcaatggtttttaattctttcaatgtgtaatgaatactgtttataaatgacttttgcgtgatgctagcacatgggactgcttatgaattatcactgttttttttttttcatcaatagcccatgcatgatgactatgacttaagacaagaacagttgaacaaagcttctcttctctcgtcaaagaagtttctggaaaacttactggagaaatttaattcccatgtggtaagttataattaaatttgtcttcatggtagataccataccattattgaaagatattctagaagtgccacgtggatgattttttttttttttattgtagcccccagctttggtcagtattggtcacagttcagcttggtcactgataataaaatattttgtcttaggactatatccattcacctgggaaggatagatgtcaaagcctttagattttcacagggatactccaaatttttgttttttctttctttaaaaatatcattaggaaataaactgctctaaaaaaaattaagccaaatctttgttcctcagtccctgataacaattttggagatgggcattctatagcatcttgaaggaacataagcagattgccagagttttgcaaatattgtcaaatattattttttgcaaatattaacctttgttatacacatttgagaagtcttggttatactcttgaaatttgaattttaattgttccttttgaggtatgatggataatggattcactatatgagcaaaagcaagtactaaagagtcatccaactttgaacctcatgttgagaaattaaagtcaatgttgatgtctgacatatagaataacagaaaggaacacattattgttaaaatttaactgaaggtccccatctcttaagtctttaagagaatctgttgcattgtttcaggatcatgggactggtgccctagttattagttcgctcttggacttccttacctttgccctctgtgctccatatagtgagacaactgaagggcagcagtttgatatgctcttggagatggtagcatccaatggaagaaccctttttaaactttttcaggtgagagcttgtatttttcttgtcagataacagtgaatttaagggaaccgcttttaggatcactgtttctaagataacatttgcatacttctatagcagaggtgtccagtcgtttggctttcctgggccacactgaaagaagagttgtcttgggccacacataaaatacactaacactaacaatatctgatgacctaaaagaaaaaaaaattgcaaaaatgtttttaagaaagtttaagatttgtgttgggctacactcaaagccatcctgggttagctttgaataaatataagcatccatgtaggctgcgggttggacaagcttgatctataatattgacgaataaatgcacctagtacattatcatattggtacattttgagtgtacagatttcttggtgtttcatgtagagtcccattgatgggtgttcactgctgttttgacactctgcccattttctatatcttgcttttttattttattttattttatttattttttgaggtgaaggtcttgttctgttgcccagactggagtgcggtgatgcaatcacagctcactgcagcctcagcctcccaggctcaagtaatcttcccacctcagttgctgagtagctgggaccacaggcacatgctaccaaacccggctaatttatttatttgttttgtagagacggggtctccctttgttgcccaggctgttctcatgcccctgagcttaagcgatcctcctgcctcagcctcccaaagtgctgggattacaaacatgacccaccacacctggcctccattttagtagtgaaaaactcatttttctgtggtaggcccaaagttcccttttctttacaaattcccaaatgataaaatgagctttagcagggctcttcataaacactggaaaacatttgttattttatacagtactatagtacttattagatacatgtatgtatatatgatgtttatatttttattattttagtatcattgatatgtatcattcaaataattataattattcaaatagatgccttctgtttcctactaatgtaaattctttgtttatgtgtctgtatctctaaggctatattgtaaaaatacctaaaatatttaaccaaactgactttgagatgtatcctttactaattttgtggcttataccttgtgtaaaaatgtatacccttcttaagagtaacagctaaatgtgttggaataaaattcttttttattttttgatactttttccccctcactttaaagcatccttccatggcaataataaaaggagctgggttggttatgaaggcaataatagaggtgagagaacaattttgaaattttaaccttacttgaatgttgataggctgttttaattgaagttgacaatattgcctttcagtctttttgggaaataaacatttctctgggtaagaaaagtaattttaaatctttattataaattagttttaaacttgttacagaaataatcctcaataataaaagttttaatttcatagtgaagttgtagagcaaataaatctgttactgcattatttgtttattttacttacttaaaagttagcattctatctgttgctcttttttggaaggataatgttgacagtgttgaagtcttgagatactgagcttgtatagaaatctattgatggagttagttcataccaaaatgataccaagtaagaaaggcaacaaaaagttcttgataaagcatatttgtaattgagctctagagattggagcatgatcttgtcgaagatactgcttctttaagatagttgctttatgcttctatattttttaaaaggttgtagctatgaatgtctgttgcatactatgatgattacaatgacatcagtctaaatggcttttgaattcttgtattttgttgtcatagaagcaatttgaatacaattgaagaaagtctccttttaccaaaaaattcatttattgtgcataagtatagcacacaattaatcacagaattagtatgcccttaagtagctgtaaatatatataggcattgaactgaatggaacatcaaagtttatttgcatttttagtgtgcatatacagccaaaggctaattttctccctttagctaatgggttctttgctcaatgttagcttccaaagtgcccatcttttacagagcttgcgatagccaagcctctcctttttgttggcagctatacacagagggagtgaacctagttttaatattaagtttagcaaagcatagtttatgaggtaaatttgtctggaaacatctcaaccttattccaaaggtttaaaaattacctgtgctactactcacctatttttttttgggtgattagaagatgcattttaaaaacttctattacatactgaatgtttttttcatttaaatatgtaaaattagttttttaaagtttggatagcttgtcctggattgccaccttagggatcatcttaccctttttccaaaggaaggtgataaagaaattgctacaaaaatgcaggagcttgccctaagtgaaggtgccttacctcgacacttgcatactgcgatgtttacaataagctcagatcaaaggatgcttacaaataggtaggtgatttaattcaatttgctgcaatttaacttcctgtctagagaattgattcagatgttacataaaactaaatgtgtttgtattacacaaataatacattttcttttgatccacctagttcttttcctttccttacagaaggattttgcccaagtgatcactgtccctgcctatggaaaacctggagggaaacactgtttactttttttccccgacctattatcaggccctgacaccatagtcatgggaccaatatggaaaagggtacttaaaagcttatggaactagaaccacatgctcaggtcttttctccttatatccctgtgaccatcttgcatgcacatgaccccatgggaaaacctcacatagttgatttttaaatatctttggtcaaatactctactttaaaaaccacagaaaaccttacatatccagcctaagctagacttaacctaaatctcttgtaattaaatgattccctttttcctgatagtcattcaaatataaacacataaatttattcacttattccacactacatgaattccagccctttttaaccctctttgtggtttctaacatgtgaccctttcagctatcttaagcatactatattatgactcatattagtaaaaacagtatcataaatagttttaattttattttttgactttttaaataatagcataagttgctgagttaaacgtttagtttgttacaatactgtacattttctttgtcatctatgtgcagttattatacatcatggtatgctgccttgccagggattttttttttactgtttatactattagaagaaactacctccctcacttgtgttaagaacaaaactagtcttagaggataaagataataaggatgttttcctagtattgtcttattagcagtgctagacaccatctttcattagagactattgatagcttattccattaacccctccccatgttaaatgcttgcttgttgtgtttctcttcagtatagttaaccagttaaattccctactgtgatcaattagtgtattagggaagcattttaatttggagaaaattccaaaaggttagtaatatttgaattacactgttaaagatctgtcaatgtataatagaaatatcactctatttgcattgctttatcttttacaaattgctgttataaaatgttatctcttttgtccctaactaaagcctttttaggagtcactgatatgataacctaccaaatgccagtgaaggaaattacaagtttaattacttcaatatgttagctttcaaattggcacaggaatgaacagttttagtggcgttcactttctggtgacaaagtatattttgggttttgcagttaaattttgttcttcagtaatgtaacatatataaaacatatgtttgtgggtggttatttggatatttccctcataggtttcatgaccattcttatagctatggtaattgaatccccaccaaagcacagaagggtcactggtgggtaaaatagggtttctacttatgaggagctttcagttaaggtgacaggtgttgaatggggattaaaattagtaaatgactaaaccatagattgaacttggatcttagatttttactttgaattaaaatatacttttatagcttttaagtgagatgagttgaataatttgctataagtggtttaggtctttgcccaaactctagaagtgaaaataattttctctctgatcttgccaaaacggttatattagaacagttgttgacttctgcttgttcagaattccaaaaaatgccaggatgccattgtcactatattagtaggactggttaaacaaattaattgtgtcatcaaatctaattgtttttgttgttttttttcttcctttaagtgggataaaaacctacttttttcctgttcgggtttattgaaaatgagtgtatgtttattaggaaaacattttaatttttagaaaattccaaaatattagtaatatttgaattataactctccacattaaattttttaataactatttttaacatcggaatgatttttttactgtagccgtattttttataattatgtgatattttgttcttaaaaattcctttctgttctagctgagataaagcagcaaacctttctcaacgtctgcttttttcagacagctaagtagacatttagtgggactctggacagctgataatgcaactgcaacaaacttgttgaaacgcattttggtaagtcagttgagaaattaggttatatactgcctaataaaatttaattgaacaagttatctgtactgttaaaaggggatggtttgttttttattgaaaagttatttatcataggagttaccgtaaagttttaccctcaatagctaagccacagtattaatttatttgggtttttaaggctaaattttctttttcacattgttttgaaaatggattttgtgtttttagccgccaggcttgctggcatacttggaaagctcagatctcgtacctgagaaggatgctgatcggatgcatgttagagacaatgtgaaaatagcaatggtaaatatgactgtcccaagtgtgccttttttaggagtaagggtactgttatatatatgtctttttttgaaacacgttaaaaattttagaaacaaagaattcattgcattgaatagtatacttaactattgatatctttattgaggtaaaatttacatcccataatattcatctttttaaggtatacaattaaataatttgtggtatatttacagagttgtgcagctatcaccacaaattaatgttatgaatagtggtcattttattctgtgttttgtttctctaattcaacttattggtacgttctggagtaccagtaagtgtgtaaatatggtattttgcacatatgagattgataaatgttgttggtaaaaacggccaaccatgaaaaaagttataggtagggtttttttccttacaagatctatgttaattataaggttgggccatccatggaaaaattaaacatctttatgatacactactataataatttcttacgtgtattctttttctgtcatcactccttctctgtctgcacccagctcccacttgcatcttgccacccctcataaaagaatcatcttgaaacctaagtagaaaagttagtttcttggataaaaagtataattgtagaagttttcagtttgtttcttcactgaaccataacatccagcattaaccttataaaatagatagaatgactcagctttacatagagttttaaaataaatttgcaaacaggcatgtaatggattccaacattattttacaggatcagtatggaaaatttaataaagttccagagtggcaaagactagctggaaaagctgctaaagaagttgaaaaatttgccaaagaaaaagtggatcttgtattgatgcactggagggataggatgggcattgctcaaaaagaggtaaaaataaaatttgcttccaaattcctggcacttctgtgtgtcctagtctactttagttcctgctgttcacagagatggtatcgatacatttcttgctgaatacctgaagcttaaaaatgaatggtacctaatttctttcttttttattttatttatttatttattttgagacagagccttgctctgttgcacaggctggagtgcagtggagcgatctcgtctcactgcaagctccgcctcctgggttcacgccattctcctgcctcagcctcccgagtagctgggactacaggcacccgccaccacgcccggctaattttttgtatttttagtagagatggggtttcaccgtgttagccaggatggtctcaatctcctgacctcgtgatccgcctgcctcagcctcccaaagtgctgggattacaggcgtgagccaccgcacccggccgaatggtacctaatttctaattcatatttttgtatacattttccttagttcatagttttatgagttgatgattaggtttttattttggtatttaatatagaattccactcttaatttttcttccattccagtttttgttcttttttattcatatgtatttattttcttcccttcttctctggactttgttttgcacctataaaaataaaggtgctcttcctgttagcctttttattcagaactagccagacaagtgttttggagattaagattcacattttaaattcaatttattgtgcgtacttaaattttgtaatatttgtttctcaaatcaaagttagatctaaaacagttttagtctcattcttcagcatgcagtgtgttctacagaacctgattcagtaatgcattcttctatctataatgggtttggcagtggttgagtatgaattgagatgtcctgtagaagcaatcttgatctcagtttttgttgatcacacatacattgtttctccttaatcttctccttacttatggtagctattgccatattcaaggaaaataactttaatatctttctaaaacaagtgggtttcttatggattaccagaatacgtaagcatagcagaacaaatattatagtcttgtgtatctatctgaaattgggatcaatgttcaattctttagagctccagaataatagattactgctaatttatataagtgatatattcaatataaagaatcattaggctttcaagtgactatgtagtatagtaaagagaatactgaactttgagttggttaacttctgagcctagtttcatcacttgttaatccaagttacggtttttagaaccttactttcctctttcataaatcggaataacaatacctcccttctctatcttatagggtttttttgatatacaagcaaaataatagtaaaggcactatatacatatatggtcaggataatactggtatagcatttgaacagttgaaaaatctacagatatgaatgattttcacagttattaaaaattacaagctcctggcttcaggtagttaaaccgatttctaaaataacagttctttcaagctgttgaatataattatcatactgtagataagtttttggcatcagacttcatatgtaacatttatccagcataagcatgaacacaaagctctagtcttagctaaaactatggataaaaatctgctattttaaaacaattgagagggaaaaggatatttttaatataaaagttttactggtttgttggtatcatttacatggggtattactaaagttttgagcaaataatgatgccagataaatgttggtcaagaagatcttttggttagcatcaatggcttatcccctttctgcgtgggtactatttttaacagtaatttctttagggaacagcaaataatctttgtgactattttattaatagaaacactaacatcaaagtttggaatgatcttatgctgtagttagagtctgaaaactaatcattgtcaagattaactggcgattcttgaaacaatctgcatttcttatatagtcaatgtttatgaagtcagttccatttgcagctgatgctctgtgctggattagtagtaacctttggctaatgtataaggttgctttttctttgttattttcagttaagggatttgtttagctagttagagctgttagcctgagtctccaattcagtcacttagtttatggagagctttttgtcctttttctgtatagcatttacatttttattactctggactgccagccttttgtcctggcggggaggagggattgaagaaagtacttcttaattagaaagtttaggaaaagatttgtcattaaaccaaattttgaattatttatatattttattcaagccactttgcattagttttcatgatagtgcacagaattaaaatttgtaggaaacattttcttatataacttttagggtttatatttgaaataatatcttttaaaatttattttaccttttttctttctatgtcgtctagtctggggtttttttgcactttaatgaaattacagacttccgtgttttaatctataccactttctactttttgtttctatcacaatgaggattagagttttcatatctgatgtatatacatgggtttcatttggagcagagattctttttttttttttttttttttttttttttaatttatttttttattgataattcttgggtgtttctcacagagggggatttggcagggtcatgggacaatagtggagggaaggtcagcagataaacaagtgaacaaaggtctctggttttcctaggcagaggaccctgcggccttccgcagtgtttgtgtccctgattacttgagattagggattggtgatgactcttaacgagcatgctgtcttcaagcatctgtttaacaaagcacatcttgcaccgcccttaatccatttaaccctgagtggacacagcacatgtttcagagagcacagggttgggggtaaggtcacagatcaacaggatcccaaggcagaggaatttttcttagtgcagaacaaaatgaaaagtctcccatgtctacttctttctacacagacacggcaaccatccgatttctcaatcttttccccacctttcctgcctttctattccacaaagccgccattgtcatcctggcccgttctcaatgagctgttgggcacacctcccagacggggtggtggccgggcagaggggctcctcacttcccagtaggggcggccgggcagaggcgcccctcacctcccggacggggcggctggccgggcgggggggctgacccccccacctccctcccggacggggcggctggccgggcggggggccgacacccccacctccctcccggacggggcggctggccgggcagaggggctcctcacttcccagtaggggcggccgggcagaggcgcccctcacctcccagacggggcggctggccgggcggagggctgacccccccacctccctcctggacagggcggctggccaggcggggggctgatccccccacctccctcccggacagggcggccggccgggcggggggctgacccccccacctccctcccggacggggcggctggccgggcagaggggctcctcacttcccagtaggggcggccgggcagaggcgcccctcacctcccggacggggcggctggccgggcggagggctgacccccccacctccctcccggacggggcggctggccaggcggggggcttacccccccacctccctcccggacggggcggctggccgggtgggggggctgacccccccatctccctcctggacggggtggctggcccggctgaggggctcctcacttcccagtaggggcggccgggcagaggcacccctcacctcccggacggggcggctggccgggcggggggctgacccccccacctccctcccggatggcacggctggccggtcgggggggctgaccccccacctccctcccggacggggcggctggccgggcggggggttgacccccccccacctccctcccggacggggtggctgccgggcggagatgctcctcacttcccagatggggtggctgccgggcggagaggctcctcacttctcagacggggcagctgccaggcggaggggctcctcacttctcagacggggtggttgccaggcagagggtctcctcacttctcagacggggcggccgggcagagacgctcctcacctcccagatggggtctcggccgggcagaggcactcctcacatcccagatggggcggcagggcagaggcgctccccacatctcagacgatgggcggccgggcagagacgctcctcacttcctagatgtgatggcggctgggaagaggcgctcctcacttcctagatgggatggcggccgggcggagacgctcctcactttccagactgggcagccaggcagaggggctcctcacatcccagacgatgggcggccaggcagagacggtcatcacttcccagacggggtggcggccgggcagaggctgcaatctcggcactttgggaggccaaggcaggcggctgggaggtgtaggttgtagtgagccgagatcacgccactgcactccagcctgggcaccattgagcactgagtgaacgagactccgtctgcaatcccggcacctcgggaggctgaggttggcgggatcactcgcggttaggggctggagaccggcccggccaacacagcgaaaccccgtctccaccaaaaccagtcaggcgtggcggcgcgtgcctgcaatggcaggcactcggcaggctgaggcaggagaatcaggcagggaggttgcagtgagccgagatggcagcagtacagtccagcttcggctccgcatgagagggagaccgtggggagagggagacagagggagagggctggagcagagattcttaacctctggtccatgtacagactttaagaattcttgaaatcttctcttccagttgcagccttaagtatgtgcctatctctgaaacaggggccatagctttctttgaattctcaaagggtttatgactgcctaaaatttgagtcacaggcttagagaagcaggtgcacctattttagtcttaaagtaaagataattttgtattgatgtgtaatagatataatttagcagatctaggctcattctctttttattttctttaactttttttcctttttacgattaaattcaggacaaaaacaatatggtgagtgtaagttcctgctacgtgtgtgaaatgcattaagctgcctggcatgtggagtcatctttgatattctctgtttaataaattcaagtcttaacttcacatgtgtttgaatgtagacacatttcttctccattagctatttcaatttgtacttgctcctcttggctttggtagcactttaacaacctgtaatcttttgcatttattgttgtcccaaggcttttgtgttaactgcatgtaaatgtttgaaacaagtcactgtttttgactattttaaattttattaatcactgtaaactttaacaaaatttggtgttgaaacagctttaggctacatggaaaatacttgagtaactatagaaatatatgctgtcaaattattatatgtgatataatttaatatcctgtatttatattcatgttttatagattttatttattccgttaatttttgtttctgtcaaaatttgatgaaagaaatgtttctcatcacgtataaattgatgatcttctgactaagcctatttggtagccccagattgagcactatgaagtttttttctgttccagaatataaatcagaagccagtggttcttcgaaagagaagacaaagaataaaaatagaagcaaattgggatctcttctattataggtaaactttaggtctcttttccaataaagattaaatttagtattgccatgagaggcatcatgacacgttcttcttccctgaaactgttgctttatgccacatgtatttttatgccatcaagttcaggaactataactgttaagattggggtgactagagatgctcctaaaattaaggcttttcatagagtgatagtctgaggaactaaaattacattaaagactttattaaggcttagagatgcttattttaaaaatacttcattacaggcttagaaataattgcatacttcctagatggaaatggagtcttaaaagaggcagatgataacataagacttgtgagaagtgagtgtccaagttagctgataggaggaccttccctcctatcaaatgtggtaacctcttccctctttttatctaccaatctcacccttaccctgcacccccttcctggacacacacatacacacacacaggacagggaaacagtcattttggggagtttgcaaagcttctttaagataactcacagtactcactctggaaactgacatttcaattataccttggccaataaagaaaaatatgtcctttgaaaactcccccacactacttttaaagtatacagtatgtacatagtatatccttaagtatatgccttggatttctctctcagttgtgttgcgccccatagaacttccttggaactctgaaatgagactttctaggaggattgcagacttgaaagtaagcatatgtgaaacccattcatccccagttagacttgtgcccaaatgttttacaataattactccaagcatatgaggaagatactttgaaaatgctcagtcatagcttggcagtttgcagtattctttcttgggtagtctgtaaagtcctaacatatatagattgttgctgattccatatgctttacccagaagtccagcagttcttatctccccaacctaaagttttgtatctgacaagagaattgtggtgtttttttttgtttgttttttgttttttgagatggagtctcaccctgtcgcccaggctggagtgcaatggcgtgattttggctcactgcaacctctgcctcccgagttcaagcgactctccagcctcagcctcacaagtagcttggattataggcatgtgccaccatacccagctaattttttgtatttttagtagagatggggtttcaccatgttggccagggtgatctcgaacgcctgacctcatgatcctcctgcctcggcctcccaaagtgctgagattacaggtgggagccactgcgcctggccagtagaattgttttctgactgaaatttgtattagcaataaacattgaagttgaaatatcaggtgtttttttttttaattcacacagatttgtttcatagtttaggttcctttttttcctcaactttttattatgaaaactttcaaacatacaaaaggtaaaagaattttgcagtgaatatctgtatacctaccaccaagattctgtcattaatgttttactctacttcctttacacagattttattttctttacttacatttgctaaaatctattccccccccccccttttttttttttttttttgcttattataaggtcagtaagggatatttatagattttttaaaatgcttagtgcatcctgctatttcctcattatatgtatgtctaggtttggtcaagaccatgccaggtcaaaccttatttggaatttcaaaacacgagaagaactgaaagatactcttgaatctgaaatgagagcatttaatattgacagagaacttggaagtgcaaatgtgatctcctggaaccaccatgagtttgaggtaaagtttgatttttccagtatattaatcttaaaaaataaagcatgtactatttggggagtgattttttttaaaaaaatttgtaattacatatctggtctttacctttccccctttaatgttatgtaggaaatactggaaaactttaatctgtgtgtcagacaaaaataaaaaaattttgtttagtaacttagctttgtacctgagaatcatgtaagaattttaataaatttgattctgtgcattccaaatctattctttccttttttctttttttttccatttctgggacctttgagttcttttttcattgaaacataccctgtttgccttgttccttgtaacttgtttgatttttttttgtgttaattgattctgaatgtgaccatattttgctgttctattaaaatattgatgtgaagagcaggagaaacaagaaagatggtggtagtaggtaattttatacgtgtgggtgtatatatagttgaagtatattataaacatatacaatttaaactattatagctttaaatttgaacatgtgagtgatcctgcgggctttgatctttaacccagttgcatttccatattccatttggatatgctcattcttttcttagcaaaatgaaaaacttgtctttactttgttttgggagtccgtattctgctagattttctcctttttcactgtctaccacttctcaagtcatctttactcattttgcttcatctcgctgaccactaaatgttggctggctccaaagtttcagttctttgacctcgttcatttttattcattgcctcaatgaaatcattaagtttcatggctttaaatatttttattttattttattttttatttttctgagacacgaccttgctttattgcataggctagactgcagtggtgccatctttgctcactgcagcctctgcctcattggctcaagcaatccttccaccttcgcctccccagtaggtgggaccagaggcttgcaccaccatgcctagctaatttttgtattttttatggagacgaggtttcaccatgttgcccagtctggctttttatttgctgatagcttccagatttttatctcttgcttcgacttttagccctagacttcatacttctatctcataattggatatctgataagtatctagaacttttctccaaaattgtgctcttgttcttcccgagcctacttctcttacagtctttatgatcttagataatgactactccttattttctagtgaaaacccttgacattaccttttatatcaagttttttagcaaattccatacagtgcaccttcaaaatttatttagaccttcttgcttttagattgcaacaatgtcactgcttctactcttgcctccctggaatctgttatcaacattggagggttaccttgttaaatagcaagcacatcatttctgtgctcaaacccttggtgctcttgtggtttcccatctcagttaaaatctgagtccttaaaatgacttaaaaccagcatctgtgtaacccccaatgctaagcattgtttcttttatctcatatcctactcctccctctctcacactctgttccagccaaataggcttcttagaaaacaccaaattcacattcttgcctcaaggtcgtcttctttggtgtttcctctgcttagaataagggttttccacagatagcctcataacctgttttctcatcttcagatcttttgaatgtcgttatctgggtgggccttccctggataccttgtttaaaaatgcagccccttttatacatacacacatatttacatacacattctctctgcctatccccatttcctgctttattttactctgtagtacttactgtcacccaactatcaaatatatttcacttttttacaggcttcacctgtgagcctagaaacctttgtttgttcaactgctgcgtctccagtgcctggaatagtacatggcacacagtgtatgcttaatagaaattgaatgaattgaatgcttagactttatatagaaaatgaaatgaagatatatatttggttttatataatttatatttttagaaatctattattttagacttcggaaaaagaattctgatctgggaattcctttttataattgcctgaaatctttccttgagacacacagcctgagtgcaagcatagtggtggtgccccaactcctgatctttgactttgccctcatttatcacctcaatgtagtaacatggggtgatttgacatagaaggaattctttacgaaaatgtaaaaggtagttgatgtgttggttttaagtctggcacatcaccagggatagagctgtgggatagagggaagacctgaagtagtgtatgtgtgttgagcaaatcatgtgtgatgcaggaccatctactccttgcttttttacggcaaacccagtagggaataaagcagattttattcctccttttttaattgacaccagatagtgctgtgacaatttttatcagcaggtcttacatttataaaattggtatgtaattctcagcatttagctaaaatagtcatgttaacaatattgaattaacaggtattttaagaaataagttttgaacagaaagaactataagaaacaattattagaaattgccaaaatctattgtaaactaaaatagtgtaatttgcttttgtttatgaaggttaaatatgagtgcctggcagaggaaattaaaataggagactattacctgagattactattggaggaagatgagaatgaagaaagtggatcaattaagagatcgtgagctactctgtatatcctgtcgcatttgttttcactgttggtttcatggctatttctattgtgaacttttttttttaaaatctaggtatgaatttttcaatgagctttatcatcgcttcttgctcaccccaaaagtaaacatgaagtgtttatgtttacaagcccttgctattgtttatggcagatgtcacgaagaaataggaccttttacagataccagatatatcattggaatgttagagagggtaaggatatcatttaaggaaattactatttgatagtgtcactagggtatgtgttaaattttaaaaactaaatttaaattctgtttgatcacattattactgtaactttctgcattcatttttctgtaatttatacttatttaaatctgagttagatgaataggaaaatgaataatgggttagaatttgtccatgtcactttatgtgtttcagttactgttttcaaatgactttagttgacctacttgtcagtctttaagtatggatgagttggacaggtgtataaaagaaatggtgacttgtagagttgtatgtacctttgattttccattttggaaaaatcttaattgatgctaccatactaaatttagaagtgtgaagatagtaaaaaccttttaaaactacaatgctacccttccaaaaaagaaaccttgagttagcactctacaaaaaattttatacagtttgtcaaataaaaaaattagtggacgtggtggcatgtacctggtggttcacctggaagtgggaggatcacttgaacccaggaggttgaggctgcagtgagctgtgatcacactccagcctggatgacagagcaagaccttgtctcaaaaaaaatttttttattttaagaatttgtcatttaacatttgaacatggtggaggggacaaattaatcaattcatcatgcagctcatttgattgctgcctgtttgttgcagtgtatatgttttatactttcttttgtgtttacatccttttacttcaagtatcatttggaccaattatttcacttacattatttcacttacttcaatttttacttatctccttaaagctatatattaatctgatgactttaaaatgtctgcctttctagggagattagacaagttatataaagaatgtaattttcaggattcattaaggaattgcaataattgacagatttctatgatttttctccttaatgtttataaaatggcattacttcttatgggctgttggtttattttgtctagtaatagtaataccttaatttttatttctattcacttctgaccagattctcatttatttcaatagtgcacagataaacttgaacgagataggttgattctcttccttaacaagttgatccttaataaggtacagtagtttcgcatacatacattgttatttccaagtcatataagtatgtaagataaactcacagtttgagttgattatccagggagtgttcttttctgtcttctcctttttagacagaaagttctgtgtgctctaatctcctggagggagaggtttttgtcagtattccctgtatagtctgtcttaatattgtgggtgcagaatgaattaatgataataaaattctgaatgacgaataatggatgacttttaatacattaaaatgatttttaataataaaaattagcttatttttctttagggactctttagggttaaattttaagtaaaatatatgcttgacataaaatggaaagtctttatcagtgtacattttgttgataaaaagtaattggaagttataagattagtcattttactctgtattttctttttaaagacattttaataggttcatgctcatttcaaacaagaggaattcacagttgtaatatataacattaattcacaatttatgttgaagtgtaagcggattttcatttcttaaaactttgatactaataccaatttgcatagttttattcttaagtaatgcaaatgttttaaactgaagtgtaattataagtacaaagaaattttaattgaaattatagtctcttaacttctaagaaattaccagttaagtttatgaaaacaaactggaacattaaaagattttttaatatagcagactttatttctgatatagaataatctgtttattaaaaagaccttgacagaataattgtaaaaccagaggttgttttttcctcagaatatatttaagtaaaaattcttaagtgatctctttgtaatatagttttgcccttttaatcaattggaattcaggttccttgaacacaaaatgctgaaaagaccaagtaataccagtcgtatcacttatttccaaggactccaaacattcttttcttcgaggaccttgtaggtggtagtacctattgggaaaggtactattgggataggttttaggttatgaaaaatgtttagattacgaaaaaaatgttttcctcttccagaaaaatgttaaggatctcatggattcaaatggaataagaatccttgtggacttgcttacccttgcacatctccatgtaagccgagctacagtaccactgcaagtacgtatccttgtttacgttttacaaatttaacgttctttgagtataattttagaggcaaaagaatcatagaaatctgaaaagatgtggtcacacacttatttttccagtaattacagtagtactagttctgagatttcacacagaagatgtgaaaccactgtaagaacgatccaaaatggacagtaacgattgagttttattttgtcaattaaagtaactgtatctctaatatggcttatcttgaggcaatgtgacttttaggatataaattgaattcattagatatgtaaatagtacttttaacattggcaagcagtaagaatatgctttgccttaaaggagtctggacaccttcttgataccagccaagaggactgatacttaacttatagaagaatctatccttagctcatttgatgtttttggtgttttaatttcctgatgtaaggagatgtgtcatgttagatttcgtgtgaattgtgaccgaaagtgctatttgagtatttagtatatgatgtattctgttatataccattacaacaggtactgttctggtacacatacaatacattaactttttgaatcccccaacagcccttggaggtggttactatccacattttatagatgaggaaactaaggaacacagaggctatcttgcccaaggtcacctgataagtggcagagctagagttaagacccagaagtctatatgctcataacaactttgctgtacctctctatatgagtctaactgaaagctgataattatggcagtatttaaaaacatgttatttcattctcaaggaaggtgattgtaagaaaaagaacaggccaggcacagtggctcacactggtaatcccagcactttggggggctgaggcgggaggatcacttgaactcaggagttcaagaccagcctaagcaaattggcaaaacctgtcttgacaaaaacaaaaagccagatgtggtggcacacacctgtagtcccagctacttgaggggctaaggcaggaggattgcatgagcctgggaagtcaaggctgcagtgaggcatttttgtgccattgcactccaggctaggtaacaaagtaagaccctgtctcaaaaaagaaagacaaagaacataaccatgttgtgataaaataacccgactacataaaaattttaacctagattcttgtaaaacattgatagagaacattgtaagaattatttgtagtaagggtaataggtattaaattgagactatataaaaccactgaaaactaactttgctgttagcattttaatgctttgatctcagatacttattggaactcttagttggagtgagtttttcccccaaaataactttaatattttgagcattgttgcttaagattaatgatacgtatctatttacataactatttgcaatattctttgctactaaaatcttagtgtcctcggtatttattaatgaccatggggaatgtagatgtcactgaatttagcttagattgctgagtgtgaacttaagaaaccatttacttcaaatgtatattaataaggaaatagtttttttggactgttaggttaggcattttgtcctaaactcttaaatcttaaaataaggtcacttaaactttcaggttaacttttaaagggatataaacccctccaaagtactgctgtgcaactttgttttacgacatctggtcttttagatttctgccttggaaaataatttaaatcttttttaaacttagagcaatgtaattgaagctgctccagatatgaaaagagagagtgaaaaggaatggtattttggcaacgcagacaaagaaaggagtggcccgtatggatttcatgaggtatgtatcttggagatacttttggtgaaggtctcagcatttcttatgccctcctgcttagcacttacagaggcgtggaatgttttaaagctgtcatttaaattcctgttattagctccaagggccctgcaactcagtttccacatgaaaaatggagaaccaaacatacatataaaattatgccttcaaaccttgtttaaaagctgttgttatggagatagcactcaggtttttagtgatttttatgtaataatttctggctgggtgtagtggcttacacctgtaattccggcactgtgggaggatcgcttgaagccaggagttcaagaccagcctgggcaacatagcaagagactatctttgttaaaataaaaaataattagctaagcatggtggtgcatgcctatagtgtcagctacttgagaggctgaggtgggaggatcgcttgagtccaggaggttgagactgcagtaagccatgatcacaccactgcaatccagcctgggcaatgaatagcgagaccctatctccaaaaaagaaaaaaaaaaagctatcttagtacttacgtcaaactataatgtttctatatggtatgaataagtaagttttaatatgcagtctaaaattcattgaaaattattcagtccaagagctaaggacagttttcctctttatcttgatacttgatcctgcctctgatcttcagcctcccaggctcatttcgaattgggcaaagatagttttatggaggaccaaccattctgctctagtataatttgattatttagcaccccacctgtcatttttactctttccagtattctttatgctctgcaggttggccaggtggtgggttttttggtttttttttgtattaaccaaatttgggttcctaaaggcctgtcaacaaaacttattttttctgaaatagtgtacttacatgtttgtttcataatttagtatgtatttactataaagtagaaaacactagtgaggtttttcattttattttgtctgtttgtaataatgccttccatccattagatgcaagaattgtggaccaaaggaatgttaaatgcaaaaaccagatgctgggctcaaggcatggatggatggcgaccacttcagtccataccccagcttaagtggtgtctcttagccagtggacaggctgtcctgaatgaaactgaccttgctacccttatattgaacatgttgatcacaatgtgtggatattttccaagcaggtaaaatgtaattgaatgtttccatggttaattgatatgcttccttagtaacagcatagaatcggtctggtgttttaaaacaaagatgtcctatttatggccttggaggaatgctgttttgacctttggaattttttgaaacagatataaagaatttgcaaattatattaataaagttgctaaaaaagcaactttttctgggagatttcaaataatgttacaaaactgagacttacaatagtaacaattttataatttatgtgaattggtgttaatgttttgaattacatactgcagtccatagacagtggtgaatgccagctgttgatctgacacgctagctatttctgctatagaaggcaagtgtaggcccacgtcttgccccacttgaccagtgaaggtgagaatttgttctccaagtcataaggataacacttgcatgtaactttttaatctttatgaaatagttacatataaatcattttgattcattactgtactaaagatatcttgtgatggaaattactgagaaactgtaacattttaaaacacttgaagttttcatggttccagttggactcaaaattatacagttagtatttagaaataaggtagcattaaaattaaagctatacttggaaaataccaaacatagttaaatcaaggtttaaatttatgtaacaaagtttgataagccctttgggggaaaatacccactgacagtgtgttgaacaacaccaagtttaatcaattaaataataaataagagtctttggctcttctagggtactgtttttcaaggaaatcttatggaaggaaatgaagtcatattaagcagccaaatagatttaaaccaaaatacctaatcatgttcccagctgtatgagagcttagtcttcattaacaaaaaagtaaggtaacctgcttcatgcctagtagaatgtcgtatgctctgaacatacaaattttaacaaatatattaaatgttgacgtgagaaaatgttttctagggatcaagacaatgccatcattcggcctctacccaaagtgaaaagactgctgtcagatagcacttgccttccccatattattcaggtgagttatgtaatcaaactaggagcaattttaagaatcattttctctgaattttattatcagtaccagtctttgttttgttgcagtctattccattttcaaaaagcctaaataggccaggtgtggagtctcacacctccaatcccagcactttgggaggctgaggcgggagggttgcttgagtcaaggagttcgagaccactttggtcaacataggaagaccccatctctacaaaaaataaataaataaataaagtaaatggccgccaggcatgatggcacatgtctgtagtccctgccccttgggaggctgaggtgggaggattgtttgatcccaggagtttgaggctgcagtgagctgtgatcatgccaccgcactccagcctgggcaacagagcaagaccttgtctcaaaaagaaaaggaaaaggcctgtactttgaattacattcatttcacttaattttttatttttttttatttttttgagacagtcttgctctgttgcccaggctgaagtgcagtggcaggatcttgacccaatccaaccttcgcctcccatgttcagatgattctcttggctcagcctcccgagtagctgggattacaggcatgtgccaccacacccagctactttgtttgtatttttagtagagcaggggttttgccatgttgaccaggctgttctcaaactcctggcctcaaatgatccatccaccttggcctcctaaagtgctgggattacaggcatgagccactgcacccagctatttcacttactcttgagttgctgaatatgctgtggaagattgagcctaaacatgagaagtttctagattccagaattgtgctaagagagttttatttattacctatttttaaaatcacaccactttaatatctgaaaagtgatttattccagtttgtggtgtatgttgatgttgttaagactactgggaggtacaccagcaggccacaggggtggacttggtggttcatatcttaagaagtaatcacagcagtcttactaacttctgccgtagattttgactattcttagttatgttttcattgataccaatgattcaaagcattgagttggtattaatctaggatacaccaaaatatctttttcttttgcattattctgcttttttggaattaagctatttaaacttcagattaacattaaacccaaataagtcaggtcctagacatttcaggcaaatgtttctattaagttgtatgccagtgacttgtgccatttgtacctttcagttgtacattggtctgcagtgggaaagaagagttaactcagtttatatatttttacattcacttatttactacctaaatgcttatgtaagtcattgatgctgaaaaagacttctaaatacagtaatgccctatcctttttttttttttttttttttttttttgccaatttctgttatttaagcatactcacattttaacatttctttgcttttcttttgtggacatttccattcgtatccttcagtgaaaaagcactgcaattattgagggctctaaactattaccacatcccctttcctgtggggccatgtggctgcatatgtgaggtgatgcaaagagaggaattttttctccctgatagaccctctcaacatgtggataaaacaccacacccaaaagatcaaccgctcccatttttctaagtcttacgaaactgaaaggaaaaagtaaatacaaatggcattaaatttcagtctaggaagggatgattaaaaaacttttaagaaatgtgctcagcataacatgaagcttgggggagggaggctttcttttaattaaccaaaaattttcagtaatatctgaacaaagtgattaaagatacttatattgataaatctagcttcgaacagtgtgtgactcctatttttttatattgagttcaaaaattatttttaagaagttatttttgtttttcttttaattttttctattctgggagacctgaatcatgccaaagcacagttaggtggctatagtagtttctgggaatgttatcttcatcggttggaaagggatatctgtacttcatttgactttaagagcagtcatcatttttaccatctgatagagcttcagaatttttagagtaatccaaaatacagtgagtaaacgttctaggttttctagtatagtgatagtttgaaatactctaggtgtgtgtctgtgtgtgtgctgaataaatgttataggttttctagtatagtgacaaattgaaatacggtgggtagttgggtgtgtgtgcgtgcttgtgtgggtgtttgccactaatttccgtaatgtcaagtcttgaactactgccattaacactagggaaaattctatatgactgtatgtttcctttttaaaatatgtaatagtatgaaacgcttaatctaaattccttgtggaatagataagacaccaaagcatagagaaatttaagttatttacttaaaagacccatagctgtttagtctcacatatgagtatagaactttggcctcctaatctgagctacttactctctttattgtaaattaattaattaattttatttatttattttttgagatggagttttactctgtcgcccaggttggagtgcagtggctcaatctctgctcactgcaacctccgcctcccgggtttaagcaattctcctgcctcagcctcccgagtagctgggattacaggcacctgccaccatgcccggctaattttttgtacttttagtagagacggggtttcaccatgttggccaggctggtcttgaactcctgaccttgtgatccgcccacctcaggcccccaaagtgctgggattacaggcgtgagccaccatgcctggctgtaattttttttttttttttttttactgggagcatttgaccccgaattgaggattcattggaagcaagtgttttatagaaaattggaacgacacctttattaagcttcgtagataaaacttattaaatgtttatcaaaagtttattcatagcaattctgtatggtttttaattagcccagatttattagagtaattccagaaattcccttcagtatttctagctcaaatttctagaggccacatcttttggtacttcctggtagcagatgtactacctgatacttgtttaccctcttgcctgttacctgcacttctggatctaccttttaggctgttttattgatcattattttctgctctgctccttgagttctcaagaagccttcaggggattcttgtgtcagctcagctgagttgaaacaaaccgagaagtctttttaggaagattcttgcacaagaagcaatgttacctgtaacattatgacaaaactagcttcaggcatgtttgggcttttctgaatacattttgatcaattctcaattgatgttctgcattaaatgttgtagaatgaatcatttttcaaatctgttgtgggtctggtagatgagcttactgactcccatgggtttttattttataatttacataaggagctataacctcagcatatgaaataaaaaacctaaagtgatgatgcaggttttttacaacccaataaaaacattttaattttttttcagctactgctgacctttgaccctatccttgttgagaaggttgctattttgttataccatatcatgcaagataacccacagttaccccgcctttatctgagtggagtatttttctttatcatgatgtacacaggttccaatgtgcttcctgttgctcggtaagaactttaagggtaatctatttaaaagtattatttgaattttatatggactgatttaattgaattatttgtgagtaccttattgcttttattaaaattataattgtaaaggctatttaagtacatgtctaaagagttggaaagcagaagaatgggggaaaattactcagaattgtaccactattccacatctagcataagaatgtattatctagtatttaagtatgtatttaatataactatattcatattgtacatgcagtttcacattttgctttcttaaagtttaataatttttttatattgtcacatagctttaatatgactacactttaaaaatctttctagttcatttaagttcttgccttattcagaaattaaataatttgggaatatggatttatgtgagttgccatttgtgagttttatttagctataaaagatctagtctttagaaaactaaggttacaaaaactaaatcggtttctatatctgatagataattcatttttctttctagatttttgaaatacacacataccaaacaggctttcaagtcagaagaggtaagccaggttaatcctctgaatacttaaccctgggtaagctgttttggcactataaagtttcctgagctgtgtattatgtttactagattataagtacttgagggtaggtattgttttattctgttcttacattgtttgtggtaccttgcacatataaagtctaagctaatatttttaaaggaaaataaatgttgctgactcattagacttaatattgaaattgcagctatgaactatagcctgacacctccatgaatataagttgttctctttgtataaagtttagattagtgatttttgtaaataattcattatgtacctgagtcttacatcgtcagctaagattcaggaagacttcagcctttttgttcagatcccaaagtggcagaagtgctaggtttcttttttgaagctgctccatgtttcatatgctttcattttactgtggggttaagctgggaattaaaaaaaaaaaaacttatttaggtagttttgacaatctaaacttaatgcctacattttacaaagagatatttattgttaaaatgaaactgaagggtgttttgaaatatgttcagcttttcatggagcatggatttttttttggatcatatcaagcagaataagaaaccaaaaccagaccactgttgagaagactaaccaaggaatgttgcaccaccttgacaatagacactaaattatatgttttatagagcagccaatgaagccctagaaagtaacccatttgtctaatattaaagatgcccatggcagcataatttccacagctttttacaaatagaaaatgagaatataaacaagttaaaaaagtctctaatgatagtaccttcatgtagtattagacatttgggcattctttttcttcctttatttctgtgccattatgcatattgtaattttttccaaatttattagaaatgatttgtatcatttcagctaacagtattttgaataattatagcaaaacagtgtttatagcacaagtctggatgtatgaattaccaaataatagtattgaagaatacaactagcaattctttacccaaaagtttaacagatagtgaatttgttactcttattagcagaaagcctgaaaatattcatcttctaatttgtctttgcaccacatgataaaacaatgtttgggttttttccctcgtctctttgttttatcctagagaagtaaaatgtctttaaatttgcctagaaggaaataagaaaagcatttatttgtataaatcctagctagcccttgggattttatttccattgagtaaagaaatgagtttaaaatttagtatgatcattatcctaactccatttggcctgccagaggatatggacttcgcaaagcagttaattataattactttaagtagaaattctccatctaaatcctagctacatttcatgaggacaggctcttaatgatcttctgaacttatttttgaaaacagaagcaagtacaggtgggacctacagccaacaatataatgcaggataattgatgtaaatcttcttgggatattccttctgttatccattactgttacacatggtcaaaggccagtcgtcctaaataatattggcagcttgtgacacttaaagctaagactgctgcagggccagaggctgttggttctgccttagagctcatgccaagccagtttgtaccagataccttccagttcacattttgctgtgtttccatctacattcccaaagcataaaagcaatttgttccaattgtgttcttttcttaaagtgttctctaaccataaatcatttattagaaaattgaaagttaactttagtgtttttgactaccttttgttttgttttgttttgaagacaaaaggacaagatatttttcagagaagtatacttgggcacattctacctgaagcaatggtttgttacttagaaaattatgaacctgaaaagttttctgagatttttctaggagaatttgatactccagaagcaatctggagcagtgaaatgaggtaaataaccagttgactgattgatttgtattttataattaagtctttgctgctcgccatctgctttgacttctgttaaaagaaatgttttcactaggtttataatctaaaatgacagtaatcattgatgccaaatcaaatgatggattttgataaggccttaaggttttctctattctaataagatttgacaaaattgctattaccttaatagagctttatataatggtagggcctaccaactgctggtacttcttaaatcagtttatagaactcgtaaggttttaggtaatgaactgataatatatatatagggaattggggtaaaatcaagacatacctctgggtatctggaagtaggactatactcccactaattaaaagctatgcccacataatttggatcgatgaatcagaacagagatacccgaaattattctagaatgtgggctcccttaccaacaccttttgtccttaatctggaggttagcattcctaaggtatgtctttgttgggggggaatgccataggagaaacctgtggaaacacagaaaaaggaaaggctcagaagcagataacagtgcccagccagtttctgttcagaaaagacttgatacttcatatttccagtgtcaaggctatctctttttggagaacccctcaattcccttagctagatagcattagatcttctatgtcaattactgaccctcgtcagactgcacacactccatgccacctgcttgttatcatttgacttcttgacctatgggcttggcatgtgttagccagcaatttgaatatattctgtatggcagtcatatttttcattgggaaaaaatatataagaatattaataaattagcaacacagttcttctgtgtaatatttttctcctgagattggcaaatataaggccccatctaaaagacgaattgctctatgtgctgataagtttctgcttagctgaggccagatcctagactacagtaagttaattgaaataaataccatctagcgagcttctttggataatagccagtttcagtttcctagctacaccctcatgcattcagatgctataccatttgcccttctaatggctgattttttaataggaaggactgggattatcagcccttttctctatgatcttctttacagatgagtatcatagataagttttttccatgtttgtacaataaaatgcccaaagtaccatatttaaaagctctcattttaggataatcattgagttattctatagatgattcatgtaactatcttacatgattatgtatctcaaccttctctttaaaataatacctcataaagcttgaatggaggtttttatgattgtaggcgcctgatgatagagaagattgctgcccatctcgcggatttcacacctcgtcttcagagtaacacaagagcactttatcagtattgccccattcctataatcaactatccacaactcgaaaatgaactattttgtaatatttattacctcaaacaactgtgtgatacactccggtttccagattggccaattaaagacccggtaagtcagcagtttaatttgtgccaccttaagccataaaaatagcctctaaacacttctgggtattttgtcctcctgcagtaagatggttaatagctttcttaagtattccttcttaagcactaagcactgtgtgactctgagtatagtttattatatttgggtagatctcacactgaaagataattttttaagggagtattaagagtattgcaatcttgatcttttgtggcaaagacaaaacaaatttcatgcagataacataattatatatatatagtattatatactataataccttggtggaagcttgtctttatagcaggttgattaagctcacagatgttggagttagccagtctgggattgagtttcagctgggccattaatatttaataactctttaatattcagtacattgcttgatttgtctaaacttcagttctcatctctaaaatattggtaataatagcagctatctggtggtgtttatgaagattattaagaattcacataagcataattcctggcacgcgtaagaggcaatgagtgcgacctgctcattgtaaaacagtatatacactgttggcctgtccagagtgcccttgggacccccctaacctgagtctttgtgtatctgtgggcacctgtgcccatgttgttctgttactgtggtggaacttataccattattaccatctaaaagatttcagaataattgccatttatactgcaagtcactgcctctttacaatgcagtgaccaaaaaaaggcaggtagactctggtacttattcaggattcaacatgagatactagatacaggctttttagtcagacctaggttttaatccagctctaccactaaactgggaaacatgcagctagctcttagaatctcagtgtttttatttattgatcaaattttagacaagaattaaatttgatagtctgtaaagtacctagctccttggcacataggcaggcaataaatattagagctttttttttcccatttgctaaccagattcccttgtgttctatccgttacatttgtttgaatgctagcatacccataattatgttagatcaccttgagaagcacaccacaatatactgcttgctttcttactacagtgtatcatctaattttgacgtttttcatggtttctggacactttaaaaattaaaacttttaggttttatcttttcacccgtaaagataacatgtaaaaaaaaataaatcttaattcttcctgggtttaatttgaagcctaatacataacacagattggcagaggatttaaaaaattttttaaatagaggaatattgccttgtaacaaataccttgctctgcccaactatacagcagtgctcaggtgattttggttatttgtatttcagaaagctgttaattggacagctaaaagtatccatttaaataaatacagcacaataattctataacttaaaaattatactctgaaatagttttactttgatataaattttaatcttttgtctttaaggttaagcttctaaaagatacccttgatgcctggaagaaagaagtagaaaagaagccacctatgatgtcaatagatgatgcttatgaagtgcttaatctgcctcaaggacagggaccgtgagttgttttcagtacaatagcaaatgtctgtcccaccttaaagtaccagtatcaaagactaagttatatttaaatcaatcattttaaaatcttttgcctatactttgatatatacaccttgggaataaccatatggaactatatctgtgtgactttcatttattgcaaacttattagccaaattgtatcctcctcttcttgctggtacattcatttctctattaattggaaaaatgtatgcagagtatctggcaccatatctgacacatggtagccattcacatgttcatttttcctcttccttttgtaatttgtattatgcatgtggaagagatttgatagcaatatgcctaggacaccaaatgacagattatgaaagaatgcagatttatcttgtttatcagtgaagttttatagtagactatgttatggaaaaatggtttgaaaacttaagtatagactaaaactgtatattttggcaagactgatataataacttagaattatagaatttgaaattgtcattttggacattttgacaagttagtggatttttaaaaatatattttgtagttcttccaactcaaatataattttataatttgaagtgaatgggtagggaacttttaggttttatctttcacccataaaagtaacatgttaaaaaaaaaaaatcttaattctttctgggtttaatttgaagcctaatatataatcatatacaattcttgatattagattcttaaaatatcattttagatggttttgtaaattattttttcttgtgccttactatactcataaaacaattttcctgtttaacaggcatgatgagagcaagattaggaaagcttacttcagacttgcacaaaagtaccaccctgataagaatccagaagggagggtatgtactgctgttggaattcaggcattgggcttcctcttgctctattattatgtagttggagaaaagtatattaccttctgtgccagtatctgcctcataatatatactcagtgtatgtttaataaacttctggccacatgcccatagtttctgcatggatgatgctccctcagtttaccagacgagtggcctttatgactagcaacttacaggttttattgtgtctccttatccatgtctgtttgagaattaactctaatgggcaatcataagaataattgaaaataaggaattcaggggagcttaattcatttgtaggttttaggtgataccattgctattcagattgctttgggcaatttatgtaattttttccaatgacatccaatttcatatcactgtaactgaagaaacagaaaatttagttcagattttaaatcatcattccctgatgccacctcatccaatgatgtttcataaacgatgaaatcacgtaagaaccacctaaaccaggactgatagtctattgctagaaacttggaataatttccactgatttctgttttcactggaaacagaacagagacagtattcctgaatgagaagacatgacattgaaaagatctgactttcatatgtttaaggtatttttaataaaaaccctaggggtttttttgagaacctgatactaattcaaattcatctaggagaaaaaataagaatggaagaaattttgaaatcttttaaattgctagacttatcagatattaaaacacttcataaagctacaatagtaaaacaatatgatactgacacaagaatctacatatagataactgaacatacagtgtaacagtttaagagcatggagttaggagtacctcttagctctgccaccagttgattttgtgtccttaaccaggttactatctctaagttgcagcatcctcatgtaaaaaatgaggatgataatggtacacactttacatggctgtttgaggattaagtgagattatggcatttagcacagtgcttaataaacagtagctcataatttttgttatatagacgcaaactctctctagtatgtatgagtttaacatgatgtatttaaggatacatttaatattcttatttgaagaattttcagtaaatggtattgagatcattagacaactatttgaaaaaaaaatttcaccttaacagtataccagctagattacagttggaatgaataccttaatataaacaataaaataatagctaaagttactgataaaatgcaaaccatatgtcttgtttaagttgaattttgcgacattccaaattaacgttaaattatcttctgttacatacaggacatgtttgaaaaagtaaataaagcatatgaatttttatgtaccaaatcagcaaaaatagtggatgggccagatccagagaatataattttaattctaaaaacacagagcatcctcttcaaccgtcataaagaaggtaagatgtctgttctcagattttaatttatcctccagctaaccttatcacagctaaccctataccatattacctgtttctacagcatatttaatagatttagaattattgtttaaaagattcttggaattatgttttaaataaaggaaaatgtagttttctaaagaagggcccaaatatttgttttatatctttcccttcataactatgtttttcagtattttgcatttctgacatcttcgctctgtggagttacttggttagtttttgtgtttagccatttagtagcaacgtgttaaatgagacagaatggaatctggaatttaaagatcatttcatgttttcttaaatggcatatgaaagcctatcataactttaaaagcctctgaaggttaaaaacaccaagagcattcagattttttaaaagcagtagaaacttttcaaatgatgatatacttctcatacgttctatttcctattgtagctctcaggaccctctagtcctgtgggacagtttgaagaacactggtatagatgaaataggtgtaatttcagattacaggattatccagtgtttgtggggccatttgcagtagccctaacagtagcagtcagaaagccaggagtatgttcaaaacatccccctttgttggggatgaggggttaggttcaatatggcagatgcccaatggcttgggaactgaacttgacttacagcacaaagtgggagagccatttgctatggtatgttgggagagaaggaagaggactttcaggatttgagataagcatggagagtgttgggtaactaaagacaagagatggtgttgcagtttaagtattggaggggacaacctgaggatctagcagttggattattaaagagagcagtgattagttgatttacttttacatgagtttaacagaatacgtttataatacattttagatatatggcttttactaatcagaatgagtttggaaacctttttcaaaacccttggttgtcttttaatgctgataactaaattattagccacaagatacagttatggcccatcctggtttctctgttatcaaggtcatctttaacttttcccaagaggggtttatacccaagaagctctgaggtggaggtcctgatctgacaggacttagttattcactgttctttcttattacgtatgtgtcactttttttttttttaaaggaaaattaggacctgttccagggggccttttttttaaaagccagtttagaaatgagttttaaggcagattattggtcagcctcaaaagtcaaaaagatttatgctgatttcaattggaattatagagatacttttaaagtcacagccaattaatttgcatctctttgcctaataggttagattgaaaaaagaagatggaaagaacagagtaattaggcatgtaggtttactagctttcacttttaaatttggttattaaaacatggaattaactaaatgtagtttaaaagttaactttctgttttgtacttctagtaagaaattgtattattttcaaatttaagaaaatactggtaaaactttaagataactggtaaaatagataccagttatctttaagataactggtaaaatagatactggtaaaatagataaacaagggcacttgttatccagaaaacttaatataaaatattcagtgtcatgtaaatgtcttctcagtcttttttctttataaagatgtgcatataattgatattaatagaatttctggtgcatttgctgtaccttgcgttctgtgatgaggtgaaaagttacaaagatcagcatagaaagtaggtattctgcaaaggatcaaaactatacaccaagtgcagttaatttaccagaaaatgttatttttctagtggaaacattttagaaaaatcaaccaagtttactagaaaggaaggatccaagggattttatagtaggtttaatttctttttttatcaactggcattaggaggcatttaagatgttaagataaaatattttatctttttttttacgttttattttattttatttttattttttttgagacggaggcttgccctgtcgcccaggctggagtgcagtggtgccatctccactcactgcaagctccacctcccgggttcacacctttctcctgcctcagcctcccgagtagctgggactacaggtgcctgccaccacacccggctaacttttttgtgtttttagtagagaaagggtttcactgtgttagccaggatggtctcaatctcctgacctcgtgatccacccaccttggcctcccaaagtgctgggattacaggcatgagccaccatgcctggccccatttttatttttttaaggcaacatattcttgaacatggtatcaaaattgaaaccacaacataatcaattttgttttgtttttctaacactaaccattggttatttcagatttacagccttataaatatgcaggataccccatgcttattcggactataacaatggaaacttcagatgacctccttttctcaaaagaatcaccattgttgcctgcggctacagagctagctttccatactgtcaactgttcagccctcaatgctgaagagctcagaagagagaatggactagaggtaatacggagtgacctttgtgctttttaagccagtttacacacattatatgactcttggcagtgaagaattcagcaagtacaaatgcagattctttaatttatttcagcagataacacaatattttccatattcttataccaaattaaaggtagaaatggagctttatttcacaatgtgagttggaaagtattgggttcaaaaccgataatggtaatattgtttacaaagtagcttattagaaatgcttaaaaggaaacttttaggagtcctttgtttactatttattaacaaatgttgatcaaacatttatgtatcaaatatttaacattaaagggttatttatattttattactgctagaaaaggcctttcagacttgaagtcaaaatggagagttaatagctgacttcttcctctgcaggtgttacaagaggcatttagtcgctgtgtggctgtcttgactcgtgctagtaaaccaagtgacatgtcagtacaggtgaggctaaaacctgtggttccaagaaaattgcactagttcaatggttcagactttaacatatctgagaatcaactggagggctcattaaactgtaggttgctgagctccaccccaccccaagtttctgattcagtgagtctggggtggtggcctgagagtatgtttttataacaagtttccaagtgtcattgatgctgctggtctgtgtatcacactgtaagaaactgtactaaagcacttgtgatctgttggcttacgttttctttcttagagaatagtttattgaacccatatgtttccattacccagcttaatgccattcttgtttcacatatcttccatccctcactctcctatctctagtattttaattggcttaacatttaaggttgtaagataggaaattcatcaggagttcattaagagctttgtagagcgtgtctttctatttgaccttttgcttatgccagcaaaattcagaatataaaacgagtactggctgttgagttccatcctctattttgaagtccgttgtgtaaacagaattgtgatattctgctatgttaataaactatacaaaattaccttaatccagaggccagcaaacttctaaaataaaggtccagggagtaaatatatgagtctttcaggcttcatacagtctctgttacattttcttttgtgacttttttacagccctttaaaaatctaaaaaccattcttagctctttggcagtacaaagaccatggtcagtttggcccatgggttgtagtagctgtggtttgccaactaccccagcatttataggaaatcttaatgagaaagactagtgatctagtaaagacattctgtttaattttggaacattgtatataccattaagcattattcacaaatttctgctggtttgatttctatgtgttaaataaggaatgcctatgtgactctactggtttttttgctctgttgtgttgtctgcaggtgtgtggatacataagtaaatgctacagtgtggctgctcagtttgaggaatgccgagagaagatcacggaaatgcctagcatcatcaaggatctctgtcgggtactatattttggcaaggtagggttaatctttaatgctttctagatacagacagcaaagtgtctttttgtcaactagccagttcctaatgtataagcacattgttttcccaaagttatttgtaagtaaaattatttggatttctaaaagcatttttcacagaagccttgctgtaaatggaggctttgcttctaggctggcctacaaagaaaaagactaaagtgatacatctaaagggaagtgggttccatctgaacattagaatgagtggcagggagaaaagagaagcctgtaataaataagtcttttaaaagcaaaaggccagcccggtgtggtggctcacgtctgtaatcctagcactttggcaagccgaggttggcagatcacttgaggtcaggagttcaagaccagcctggccaacactgcagaaccctgtctacaaaaaaatacaaaaattagctgggtatgatggcatgcgcctgtaatcctaggtattcgggaggctgagtatttggctgaagaacaagcaactccagaaaattcaaccataaggaaaagtttagctggcatgctgacaccctatgtttctgtggctagtgtgactgagatatatgcttcagaggtagcctgtgccactacactccagactgggcaagagagtgagactctgtctcaaaaaaaaaaaagaaaaaaaaacagggccatgtaaaacctgaaaactagagagttcggcactgcttggtgggaaaggctttagagatctgagaacttactatttcctcccaatccagacctgctgaggaaggttgactgtgggtagatgagatagatgactgggagggagagagaaatgtcttaaataactgggcagagtgagaattgtcttgaataaaacaggatcgagatgctgatctagtactaaagtatcaagaagtgagggaattgatgaaaatatctcctctactatatctacttaatgtccttagaagtatttgattacagaataaaaaactgacataaataaatcttttaacaactgcacaaaatatgtcgttacatttaagatcactagcgtgtaagttgctattgatgccatgtcactatttttaaaaattaaaaatacaagaagtgaaacaggaaactattcccaagtcttctgacattagccttaaaggtagtaattctggtatctcgtcatgaggtcacttttaattttaggctttaaaggatgtaggattcagatttaaattggaattgaaaatgtaagaagaggtaaacattttacaaaataacgtggttggcttgacatacatgcacaaccagttcctcttgggagctttttttttttttttaactctgtaacaactaatgctctcatttttattctctcagagtattccccgcgtagctgctcttggggtagaatgtgtcagttcttttgctgtggatttctggctacagacacacctatttcaggctggaattttgtggtatctccttggttttctgtttaattatgactacacactagaagagagtggcattcagaaaagtgaagaaacaaaccagcaggtaactttaacattgctttaatattgaatttgaacccaaaccttaggttggtgttaaactaatccaaaccaaagctgctatccagagtccccagagataaattgtttttcaggaaaattaggttttttgctttttaaacctaatcacttacttacaaaacttttagttgtaattgcttatgcttaaaggattccaggcaagggaatttgcaatagcatatactggacataatttaataatttcttaattactcagagtcaactttatgatggcaaaattatggttgtgtaacacaggacaatataatgttaccatcaggcagttgaggctagctcccctaaacacttgagtacttgtctgatttttatagatatttttctgtctcttctatgtgctctcatttattgctcatattgtaaatgtgtgcttctagcaggcagggctgcctacctatcccctactccccacattaccaccaaatgtgcttcttccagttgtctgtgagatatactgcattgggtataagttagtacatagattctcctggtccttcttataaataaaaaacaagccccaacacataaactttctgatgtttacctcagtggtaggtactcttgtacccttttgttggttgactttttactccttaaatatgttccatatagtgtgattctgtaaaattatagtattacctatgtaagataacagatctactttaacaacttaattttttttataacaggaggtagcaaacagccttgccaaactgagtgtccatgctctgagtcgccttggagggtatttggctgaagaacaagcaactccagaaaatccaaccataaggaaaagcttagctggcatgctgacaccctatgttgctagaaaacttgctgtggctagtgtgactgaggtatgtgcttcacaggtagcctgggttttaatcaatagtgcaagatcctttaagcagtaaagtagtacaataatattgatctagggaacctaaaaattaagaacgttcacatgtttgttctctcaagcaagaaattcactttataatggattgatgctaatgatgtcagttctacaagtccagtttttgcaagggcaaattaactttgtttctcagctgtggagcctatcataattcttaccaaccttgagtcacaaagggacaggacgagagagtgaagttggaatggtgtttcacaatggcagactactgggagacaggagacccagagtctatttcaagctatttattgtaagccatagcttattcagacacggggttaaaatcctgaaagtaaatacatacatgcacatatacatgtatatgtatctatgtacatacatagatgcattacaaaaatcagtatgacatgatagatctcccaacctctttaacttcttttgcaaggattattgagaaataatctgagaatgtagcactaaagaatttgataaactatagaaatcagttaaacaggttactattatcctttaattataaaaaaaaaaagagtactaaaagacattaaaataaatgaagacactagatcctatttttggtataacaaaataaatggattgatagatttgtacccatatgttaactgtaattattcctgaatggcataattataggcagtttttcttttgttttcgctaaggatgaactgtgacttttgtaagtgaaaaaatcctcaggtttccaaagtatttttacaacttttaaacaggttatttgtttttaatccaatgtgattgagtccaattttcagtgcttgccatgcttttcagttcccatgtgtgaaaggcaggagctctagatgctactggtttttttttttttttttaattttgtttttgtttttactatttttcctaaaacactagacgaccagggaccactcctgatgttagttattttcctggactttttgctcaccaatgtgatacattttgctgactgaaagcattctcttcagaaatgccaacaagtttgggattaacctttatagccacccccactaaaaattttttatagcatttcaaaattaaatgttggcatgagctccaactggattcaataaaatgcttaactagaagttagccttttgaaaacaaggcttgcatgtctttgtataagatggaggtcatagtcctctgttttcctattagcagtagacctctgtaaaaataaaagatttttattcagacatttaaggaattgtgaaatatctgtgtttacatttaaaattgaggagagctcaacaataggaaagcacaccagatgcctaagcagtcataatctatgcctgcagaaggactacacagccttcaatatcagggtgtggtcaggaaaatctgactttctccccataaattttattttccttcatacaggtatgcttcttaaagacttaggttttgttttcaaatacatgtacataaaggtattatgttgtgattcttttcaagcttatagtcacagtgtgtttattaagtactttcaaaatattgaatttcaccatggcacagcagattttgagaatgttgaagtcagactcaatttcaaatcctagtttcaccagttaccagttgtaagatctgggacaaataatttaatgatttgcagtcttagtttttctcagctgtaaaatggattatatcaataaacttgttagaattattgagatacttattattgaggtccattatactataggcaactattatagtgtttggcctataatagacatttttaataagtgataatgtcaataagttttttcactaaatgttataaaacggtaatattgtctcctagattttgaagatgcttaacagcaacacagaaagtccatatttgatatggaacaattctacaagagcagaattacttgaatttcttgaatcccaacaagaaaacatgattaaaaaagtatgttattgttttataaatttcttgggtaatttattctgatggaatctctggaagtacagcagtattgattagaacagaaatccactacttctcactttagtgtcagtcagtatggctttctgccacctaatatttggcccatttaagaagagcattgtgttgtatgtagtaatacattaggaatttttattgttgttaccacttatatacagctgtcttctattttaaccagtttttgaacccagaaaccttattttagttgttcacttcagcctcttttcgctagtaagtgaaaggtgctttccagtatcaagactgaacattttttctaccctgccaccttttagtggagaagctattactgagccgtgaaaaaaaaacaaaaggcagtaggatgggcaataaggagaagacctggataatccatacactagatggttgagtcttgatgattttgaagataattatgtgtgtggctttggaaattagagtaactattactgtaacatctcagttatttagcgtttttgagctcattccatgttagtcatctagaactctttatagataaaatttttgagaattgcagagctagggagaacgggtcttacatgtctgtacattatctttttttttttttttttttttttgagatggaattttgctcttgttggctcaggctggagtgcaatggcatgatctcggctcgtcgcaacctccacctcctgggttcaagtgattctcctgcctcagcttctcgagtagctgggattacaggcatgcaccaccatgcctggctaattttgtatttttagtagagatggggtttctccatgttggtcaggctggtctcgaactcctgacctcaggtgatccgcccgcctcagcctcccacagttctgggattacaggcctgagtcaccgcgcccggccttctgtacattatcttttaccagaatagacataataacatctctttgtttagcattttataatttattctatacttttacatgttattttagtccaatctaaattcgttttggtttcagtcttaatcttcatgggactgtttttctcccattcctcctctattttttagcacttttgttcagtgtattactttttttttttttttttttttttttttttgagattgagtctcactctgttgccaggctggaatgcagtggcatgatctcggcccactgcagcctctgcctcccaggttcaagtgattctcctgcctcagcctcccaagtagctgggactacaggcatgtatcaccacgcccagccactttttgtatttttagtagaaacagggtttcaccatgttggccaagatggtctcgatctcttgacctcatgatccacccgcctcggcctccctaagtgctgggattacaggcatgagccaccgtgcccggcctagtgtattactttttaaaacccagtccaaatatgctcatttctcagctctgtcatcctacgtcttactaggtctgatgtctgctgagttgattgagaagaataaagcgtcatacttgctttataaactctggctctaagacctttgttagctgacctctgatcctttgaaattttaaaatgagttaataatagtaatatttgggataaaaaattataatgtaattgtatgcctattccaaagtctttttaagtgctgtgacatgtatcacaccacattttttctctagaatatgcatagatctctcaagttatttatctgttaagttattaaactgaacatggatagatttacatctaacagtctattttttcatcttttaaaaagggtgattgtgacaaaacttatggatcagaatttgtctacagtgatcatgccaaagaacttattgtaggggagatttttgttagggtgtataatgaagttcctactttccaactggaggtaagctctctgcttttaattttacctgatacctttgatcatttgttactgaaagttactagtttattcacactttatagaggcacacttcattttattgcactttctttactgtgctgcttttttttttttaacaaatcaaaggtttttggcaaccctgtgccaagcaagcctattggcaccatttttccaatagcatgtgttcacttcatgtctctgtgtcacattttggtaattctctcaatatttcacactttttcattatcacattatggtgatctgtgatcagtgatgttgctcttgctaattgtttacataagatcgtgaagttcatcaatagtgaacttcatcaataaatgtatgtgttctgattgttccaccaaccagtcattccttggtctccctctcctctggcctccctattccctgagtcaacaatattggaattaggccagttaataaccctgcaacggcctctaggtgttcaagcgaaaggaagagtcacaggtctctcactttaaattaaaagctagaaatgattaaccttgatgaggaaggcttgtcagaaggttaaataggccgaaagctatgcctcttgtgccacacagccaagttgtgaatgcaaaggaaaagttcttgaaggaaattaaaagtgctcctccaatgaatacatgaatgacaagaaattgaaacagccttattgctgatatatggaaagttttaatgatttggatagaagatcagaccagccacaacattcccataagacaaaggctaattgagagcaaggctgtaactctcttcaattctgtgaaggctgagatagagggtaaggaagctgcagaagaaaagtttgaagctaggggggattggctcatgaggtttaaggaaaaaaactgtctccataacctaaaagtgcaaggtgaagcagcaagtgctgatggagaagctgcagcaaattacccagaaacttagctaagataattgaaggtcactacactaaacaagtttctaatgccttctattgggagagcttgccatctaggatttagctagagaggagcaatgtctggcttcaaagcttcgaaggacaagttgactgtcttggtagaggcttatgcagctgctgacttttaagttgaagccagtgctcatttacccttctgaaaatcctaggaactttgagaatgataaatctgttctcacttataggtagaggctaaacagtgggtacttatggacataaaagtggctataatagacactggagactactagagggaagacgggggtggtcaaggttgaaaaactattgggtactgtactcagtacctgggtgacagtcataccccaaacttcagtattccaggtaacaagcctgtacatgtacccccgaatctaaaacaaaagttgaaattatttttaaaaaattatgctaaatctgcctgtgctctataaatggaagaacaaagcctatatgacaacacgtctgtttatggcatgttttaccaaatattttaagcccactgtggagacctactgctcaggaaaaaaagagctttcaaaatactactgctcgttggcaatgcacctggtcacccaagagctccgatggagatgtacaaggagattaatgttttcatgcctgctaatacaacatccattttgcagcccatggatcaaggagtaatttcaacttttacatcttgttatttaaaacatacatttcaaacagctgtagctgccatagatagtgattcctctaatggatgtgggcaaagcaaattgaaaaccttctggaaaggattcacctttctagatgcgtaagagcatttgtgattcatgggaggaggtaaaaatatcagtattaacaggagcttggaagaaattgtttccagctctcatggatgactttgagaagttcaagattccagtggaggaagtcactgcagatgagctggaactagcaagagagctagaattagaagtagatcctgaatatgtgactcaattgctgcaatctcattataaaacttgaagagaaaaaggggttgcttcttgtggataagcaaagaaagtggttcttgagatgaaatcttgtgaagatgctgtgaacattgttaaaatgacaaaagatttagtatattacataaactgagttgataaagcagcagcagggtttgggaagattgacttcaattttgaaagaaattctcctgtggataaaatgttgtcaaacagatcacatgctacaaagaaatctttcatgaaaggaagagtcagctgatagagcagacttctttgttttactttgggaagccaccccaaccttcagcaaccaccaccctgattagtcagcagctgtcaacatcaaggtgacattcccaccagcaaaaagattgacttgctgaaggctcagatgattgttagcatttttcagttaaggtatgcacgtagttttttttagacatgatactattgtacacttaatagaccacagtataatgtaaaaataacttttatatgcactgggaaaccaaaaaattagctttattttggtgatccagaactgaacccacactatctctgaggtgtgcctttacaccgaaataataccaaatgcttgtgatggggtgaccactgacagcttgtgagcctctttatcttgattgttgaagaattgaattttgtgaagtttattcataagaagttgttccttgcccagctttttcttatattttgtgcctactgctatcccactgggccatgtttatatgcctttaactcactagtccttcatggacgtacaaggccagttacatgctcatttcatcacaagggatatcagaccaccagacacaaggcttcctctggccaatattaggagaaaatataggttgaaaataaagatttttttagaagatgactggagtcacatcagatcatcttttgtgatgattcctcatcacttccagaagcagctgaggagcttcttctgagtgcttggggatcatatagggagtttttgctttcattttttgttttttctatttaaagacgggtctcactgtcttgcccaggctggtctcaaactcctggcctcaagcagtcctcctgtctcagcctcccaagtaactgggattacaggttcaagccactgcccctggcttgtaggaggtggcaaagaggatttggtggttgatttgtttgtaaaaaggaaagaagtgaggctttgttttagagtttactcttagaggaaaaatgtactatgccataatgtatatcacgtatcacagagtaatatatatgtaaatagctattaagcagaatgagttaagtgacttgtgacgtccctttgaaaattgtcctttgaatttctaaattttatataacttaattataaaaatataaccaaattttagaagttctgtatcatactatctgttacttcgattgataaagggaggaggtattctaatctcagaattgttacactaagatactaatgggagtatatcagatctctggaagttgagaaatactttataatgtttcctgccctctacatcccccctatagtgcataggtgtattcatgtgtatgtataatttaatcatgttttattcactttcatagcttaaagttctttcttttgctatggagttatttcttagggcacccatgttgtttaaatacttgtctgcattgattaggttccaaaagcatttgctgcaagtctcttggattatataggctcgcaggcccaatacttgcacacattcatggccatcacacacgcggcaaaagtggagtcagagcaacatggagatcgcttaccgagagtagaaatggctttggaggctctgagaaatgtcataaaatacaatccaggtatgtgactacacctttgatcaataagactcgtataatacaggagccctaaaaattccaataatcaattttatcagggaaactcagggaaaattatacttggttataatgtattaatataacattacagggaattgaccctgtaatagttttacaataaaagttaagctggggagagaggtcaaggcactatgtttagaaaaattcatgtctttatgagaacatgtgtctaaatgagttgaaaaggcagaatagtttgatagtataaaatttcacattgatgtcttaagttaacatatcaagtataagtgcttgaattagatttatttaataataagtgatctaatttttgcctcctttctggtccctaaccagtgccatgtgcatatgggcactgatgtttttcaaaaattgcctgaagtttttggtgtataaaaattgaaataaagatatgagagttcctactcttaatcatctttaagaggacatttccaaaaacattactctagcctgactccagggagatggatgagtgaaaatgtaacagcttctctcaactctaacttagataataaatatagaacataaacctaaaatgatacaaattcaatttaaattactcgatcttttaaaataacattgaacattacctttcaagtacatttttactcttcttagtatgtattaaagtactgttaaaattctgacttttgggttattgccaaaaagttatttaaataaaataacagtaattaaatattgggaaaattacgcatttacaagatgtacattgggatgttattaaagacagtgttataaaatctgaagaaaacttgtcttttatttggagttgtcaaagtgtcgaatattactagtggtatgttaggtacaaagaaattgtagcagagcagactattgatttggaacttgtaaagagttgaagaaaggcctgtgcagaaatccttctgataatatccatcaagtttattagaattaactctctcgtaatttagaagtatggtttgtgtgtcattgatgtatttgacagttattccctatcaataagtggtttgaaaatgaatttaaaagcaacatatttatagaatattctcagactctttaagttgaaggagtcttactgagctatcttaagaatcctcaaaagataagaaattacactgtatgttttactaccatatagaagaggaagaatatgctgaacaaaacggaagtaaatatatgggattaggatttgaggtgggtaggaatggaaataccatttcattttatgtattttcacaaggagtgctttgtatattcataccagtttgtttgtattatagttaagtggcagagttctaacctagtcttatttaaaagccaaatcatgtcagagtctcccagaatataattaggttgaggggggtaaccctaaggtctagaggtagagtgaaattactaccttacactttagatttttgagctatatttggattgtttatttgataaaggtcttagcctgagggttaggggtggggatgggaatgaaaacaaagtaaacctaaaaagctctaacaccttacattttgccttttaagacttattgttccttagaggtcctccacttacttcatgtcacagatgtttagaaccagttatcagagacttaaaattgacagtaaacaacagtgtatatcggttttctgaagttaaataatttcaaacatctcctggaagtaaaccattttattcttattctctaggttctgagagtgaatgcattgggcactttaagttgatattttctcttctccgagttcatggagctggtcaagtgcagcagttggctttagaggtaaaagcgttttgtactaaagcgtgttgcctttcctaccacttaccatgtgtaatttgagtctctatcagtcattgtctgaagttgaagtgtgcttttttgttgcatcattttgcctattaagacacatcaatattttttgaaatttgaattaacatgctcaatttgaagagtgaatattgcacaattgcacaatgtcgttctaagtggttctctttctgttatgcgttagggcttgggatagtgttgtacagtgtcaggtatgagttaagaatgggctttactggggaagcttagaagccacacatcagcaagaagatgatagagggtttctgattgctgtgttcctatggagagacatactgaggccatatctgttagctacatactgtgggtttgcatttcagaggagtgatccttgtccctcccccgcagttgaaactcccttcttacaaatctagtacaagagctaccttttctgtgagggttacagacagacacctgggtatgctgctgttataggagttgcctaaaaaggccaactgccagaacccatgggtcttaagagtccaagagaagttggagtccccttgttcaggatattgaagccactggtcccataggatgctgtttagatgtagccttttcttctgagagaagcaagaagtccctagtcacaagtagttctttgcccaggcaaccgagacttcccaggattatttctgagatcttgctctttgtgacacacagtttattgcaaagaacaccaaatgcaaccctgcagtaacaggtatatagatggtttatgaataatttgtgtaacatgttcttagataacattttggcttaaaacagatttttaatagaataaaaaaactttaaattggtcaaagagcttaacaagcaagttatttaaatcgaaaaacatgttttcctacttaattccttcaagcatcttgtaactttttaaataaacgtcattaaatgtaggatatgttgcactgagacgctgaccaatgatgtttagatgtatactctcaaagatgtgagtggtcatcctttctgaaagaaaaacatacctatttctttataatagaaacataaccccaatctattgtgcagggtactgaagacatttgcttttttcctctaaaagtaagagtcccagtagtgagaatcattattttcctaatcaccagcccctatccaaactctgtaattggaaaacactatagtatataccttagttctggagcatgtatgggtataggattgaaggcttcttagaaacctcaaggtattatttccaaagagattaataaaggcaatcttttaaaattaaactcttatctaaaaactaaatgtttcatcccccaaacatttgtctcacttgtacagtctatatgacctaatttgatttaggttcaaaattatttctgaaacttttactatcctgttgattaattttcaggttgtgaatatagtgacatctaaccaagactgtgtcaacaatattgctgaatcaatggttttgtccagtttattggctcttctacattcattgccatcaagtatgtatacagatggaattttggaaaccacagcaagattagcccatggaaaggagttgttgcatagttgatacaaaacctcaaacaaatgtcatctatgtttagttttaaagtgttatttacactagatttgtcttcctaataatgttttacatacgttactgtcttgcatttcctatgtcaaaagttgaaagttgggggtgagagaggtccaaaaccaaaggaaaataacctgggattttcagtttgttgagatctacacatgggtaattgagaattaactaatatttcatggtttactaaacataagtaatcttggatgatagaaaacatgcttaagatacagatggccttgtattcagcttagtgttcaaatctgtgtactttgtcttttgctgatttgatattaataagataaaataccaaggtggtttaaaaaatatatcaaccttatttcctgaacacagcctgccctaatctatataattacctagtctaatagtttatagttgtgctaaaaccaaccctgagattgcttttcaaaggcaggaatattgagtttgtaggcaattacaatataacttcaaactcagcaataaccagaatacattgcttagttggctttgccaatccctttgaagtcacattaatctagaattcatgtctgtccacctccttaagagaaggaaccgtgtcgttcatcttatataccagtggcttgcttatgtttggtgtttatgtttggtaaattgagttgaatttccatggaaatttttttttttcaatacatgatatgcttgaaacaggtctttaaaatggcagctttgtaaagtcatttgcagattgtttttatcatacctgcaaccttagttggtttttcttttttcttggttttcagtagctttgtgagacttcaaacaatgtaaaactaaactggttggtgaagtaaaggatgttatggaactcataatttttaaaagtgtaactttatacttatatagtccagtcaatattttagtcttacagggaaaatagctggcatccagatattttagcctactctctatcattaagacttcagactaaattatcttacactgtttgctaaggtacattgttactgttcttgttgttttcatctcagcctaatactttgcagcctctaccttatttgccaacactttattcctttggcaacctgtctgtcattcccatttgactctagaagagttaagtccagtaacctatacttgcatataatatggtagtgactgggtgagaggcacacaggctttgtccagaaggatgcaattatgtcttagaatggaacccggtcttacaactgctacttcctactttttccctcaagacagtagcaccaggtaaaaatcttagatgcctgattagagtgtcctctgggtgtcaggaaatcagatttttggatgtgcagtgcacaatgaggtaggaagacagggttttatagtggttatgaatatggactttggaggcagacctgcatacaaaactcaactataccacttattagctgtgagaccttgggccggttaaactgggcatcagcttcctcactcataacatggccatgaaaatacctgtctcactggttattatgaggattaaatatgacatcctgtgtagaacatctagttaagtgcctggcacagagctggtgccaagtaaatataagctaacctgatgatgcattccttgaaatgtcttttactctgcaggtcgtcagcttgttctggaaactctttatgctttgacatcgagtacaaaaataatcaaagaagcaatggcaaagggtaatgtatagagtgctttcttagctagtcatgtgcaatataatgaagcttattttgagctgcattttacagcctgataaactagaagaatgctttggaatgtttacagtttttaaaaactacattcagttgaaatatggttgaaaatgaattctgattagaaaagtcaaattctttataagcactaattatctttttccttcataggtgctttgatctatttactggatatgttctgcaattcaacacatccacaggttcgagcccaaacagcagaactttttgccaaaatgacagcagataaactgataggtccaaaggtaggcacaaaataagttcttgaaaggaaattaattattaaagcattgttactttgatactgatttcaagaagtttactgaaatctgagatggtgaggataaggaaatgaggtgatgtgaaagttggaaaattgacattccgggaattgttcctatgtattactgtttgagaaaactagagtcagggcaggctgtactggaattgaaaagtcttaagagaatgtttggattaagatacactgttcatctccctcgaagagggaacaaaaagtatatcaagactatgacagaagataggttagactttcacactacaaggattggcctgtggaaataactagtgaaggagatggtggtttgtgtattttacattccacacctgaattattaaggacatgccaccctcagcagtgaattcatataggggcatgagtgtaacaacacttctggcttccaactctgcagggagatcttttattccaaatctggagataaccggatgatctctggatccatggtccagtttggagagcaggatacctgttaaaacaatagttctgaatagaatttcattcaggtgcaagtggtatcaatgtccctttattttgttactaagtcagtttcacaagtagtactcactgaagagtcctctgtgcctgcccacaaagcagccccttagtcatagggagaacatgaaataaaggctcaggagtcctactttcagagtttgattcagtagatctagggtggggcccaggagtctccattcttaacatgcttccaaagtgattcttttgaagcctattcggactgatatttagggatcattattcaagcaagtccacaaaggcactttgggtaagggggaggctaagatcccctacctctatctaaagccagggtggcttcctttgtacacattgtgcctccatgtaaagttcagtttgaaaaaaaaagtccgaggctaattaaacactttttacattaataaaacaaattgaattcagttgttttcttgctcgatctctcagtctaggtattgagaatctgtcataggacctgaaacagttttactttagtaataagttaatagtcttctgcagggttgatgagacaagcaagattacatttggaagcctacaggagggtctataaaatagttaatattgaatttccttaaagctagagctaggtagcacataactgtaatatctaatattagttattttttctttattaattttttttatttattattatactttaagttttaggatacatgtgcacaacgtgcaggtttgttacatatgtatacatgtgccatgttggcgtgctgcacccattagctcgtcaatagtgttttagacgcttaagtatgtactggaattgactgagctctttggttatatttctgacctttgaaatacgtgagggacaaattttatcaagctgactgtttttacacttaaactttctgtatagacaaaacacaagtatcaacaccttaattgcaagagattctagaaccggggtcggtaaatttttttgtttttgagacaaggtctggctctgttgcccaggctgaaagtgcagtggtgcaatcttagctcactgcagcctctgtctcccagactcaagccatcctcccatctcagcctcccaagtagctggcactacaggcacgcaccaccacacctggctaatttttgtatttttttgtagaggtggaaaggtttggccatgttgcccaggctggtctcaaactcctgagctcatgtgatccacccgccttggcctccaaaagtgctggaattgcagggtgagccagtgtgtctggccaaatttttttttcctttttggtaacagttttcttgagatattaatatcattgacataccatacagttcacacatatctagtgtacaattcagtggtttttagtatattcacagattgagcgatcataatcaattttaggtttgactttcatcaacccaaaaagaaaccctatttctattagcagtcactgtccattcttcctttcccctagcacctgacaaccactgatctatttccttctggatagatttgccgaatgctgggcattgtatataaatggaatcatactatgtatggtcttttgtgactggcttccgttgttttcatctatgttgtagcaagtgttagtaaatttatttttattgccaaatagtattctgtgttttggtatccatttatctcaatggacacatggattgtttctattttttggctctgctaaattacactactgtgaacatttgtgtacaggtttttgtgtggacatgtgtttttgttaggagtgaaatttctgggtcatatggtaacattatgttaaaccttttgaggaattgtcagattgttttccaaagtagctctaccattttccattcccctagcaatgtatttatcatcttcttctctaacgcttgttatatcttttattacaaccatcctagtaggtatgatgtgttacatcatggtttcgatctgcatttccctggtggctaatgttttcatgtgcttattggccatttgtacaactttttaagagaaatgtttatttacatccttcactaatttttaaattgagattatttatatttttattattgagttgtaattgttatgttttagatactagtcccttattataggtatgattttcaagtattttttcacattttcctgattgtttctccactttcttggtggtgccctttgaaacacaaaaatttttaattttgaggagatccagtttattttttgtttggcttgttctttttatgtcatatctaagaaaccattgcctaatccaaggttacaaagatttatggctatgttttctcctcatttttatagtattagctcttaggtttatgtttttgatccatttgagttaatttttatccatggtgtgagataggggtgggccagtaaactttctctatgaagggcttcacgctgctgatgaagacatacccaacactgggcaatttacaaaagaaagaggtttattggacttacatctccatgtggctggggaggcctcacaatcatggtggaaggtgaaagccatgtctcaaatggcagcagatgcaagaggagagactgtgcagggaaatctccctttttaaaaccatcagatcccttgagacttactatcacgagaacagaatagcacgagaaagacctgcccctgtgattcagttacctcccaccgcgtccctcccacaacatgtggaaattcaagatgacatttgggtggtgacacagccaaaccatatcaaaggaccatatagtcaatattctatcctttgtggggcatgtgatctctgttacaaatattgagctcttctgttgtgacaggaaaatagccatggacagtaaatgaacaaatggatgtggctgtgttcaaacaaaactttatatacgaaaatagatggcaggccagatgtgaccccttttttgccagcccctgttctaggatagctgagtaacctgaacataactggagatttatggtcacggtatttgccttatgtaggttttttgctcaaatgtttaatagtatacacaccagtgagtaataaacttatgtagttcttagcatttgaaatgctttaaacatcctggtaaactttgctttaatactgctttttacagatgatagacttgggtcattcattaaattgaattaaattagaatactaaacaagcattctcagaaatccgataggaagagacttttgattttgtacagctggtcaaataatgtgccttttttaaaagtatcagatgacagtaggttagattaaataaatttagaaatgaaaggactcatgttaagacagttatcctaaatacaattaaagtttgctttcatatcaatttgataagactcataaatatagctcttaaataagacatttgaaattcacccaactggtcaatagatgatttctgtagcagtcacacacatacagcttattacaagtatatagttcacttctaaaaaaggttattacttaaaatttagtttacttgccataaaaatttcaatttttgtttcaagctgcaaaatattttaaaataggttagttattaggagttcttttaaatactagtctataatgaaatctgttaagacatatcagatatttctgccctaaaatttatgtagaatgattacaacagtgattcttatgagacagctaagtatgtttcagaagacaattttgttaaaaaccttaaacacaacagtcatgtacagtgactcatgcctgtaatcccagctattcaggaggctgaggcaggaggattgcttaaggccaggagttcaagaccaacctgggtgaggtagagagaccccatctcttaaaaagaaaaacaaaaaaaaaaggttagaagttagccaagcatggtagtgcacctgtaatcttagctactcaggaggttaaggagggaggattacttaagcccaggagttcgaggttgcagagtgagaccctgtccaaaaaaacaataagcagttgtattaaaggtgatgtaattggcctgatatagcaagatggcagcataacgttctgagcaaaactcttgctttatgaatcacagatcactgacttaatgagtctgggtaacttgtctgtctttagctccacagtgaaaaaattgaaataaatggcctttaaatcccgctctaacttttaggtgcttctttgacatgtaatttctctggtctttgtgagaatgagctactaggggcagatataccacagtgagcaggtcaagcattgttcttacactcagggagctcatgaccaagaagaaggacatacttaatcactttgtctaccttctcttgtcctctgtagagtttaattatatttcagcacaatactctcatcatatttagggaatataggaagaaataagcctgtgaaacctcttgttgagtttaccttgatggtattatttaatatataacaaatgcccttccatgggaaccccaggagaaattgcttttttcctccagaaacagttgggtgtctctgaagcaactgacatgattttattttgtgggtgttctgttatgtaattgaaatttagttcattggctgctaggaaattcagagctaaatttgtagtatatctctggcagttatggaggttttatgtttctttcgtgtgctgacttcatattagtcttcatttattcaagtatttaagcatctgttatgtgccaggggctgagaatacaagcaatgagtaagaaagattgggcctagagggtttccgtaagataagatttgagcccagaatttgacacggagaagagataaacgtgacgatctgaaggaaaaacactttcccaaccctcatttttccctttgccccatgcctcacatgaattttcattttgtctgtatgtatgtgctagatgtattttttaaaagctgctttttaaatcctttctggaaaaagacacagtgtaacataaaacatgcagcaaaataaatgcactagaaaatacttgtaagacagaggtagaatgagaaaaattagtttgtgtgggcaggggctataaaagagagttggaagggacaagcctggctaagggcattctgcatattgtaaggcaagacctatgaggtgtgctctgggaactttaccatactagtgatacggaggcagggggtgaaaatgaaacttttttggtcaccatggcagaacagagaaaatgaaacttgataggtaagtaggttcaggtcgtactgagtcttatttaaaggtacctttgcataaaccgaggattatctttttcactccagaacttttaggtaatggttatggcccacataagtcataacacaaattatgttgatattctatcttattagcaaaatacaaacaaaatattgaggtgtttccaataggtgtctttttcattctcaaacttcctcgtataggttcgaattacgttaatgaaatttctaccaagcgttttcatggatgctatgagagacaatcctgaagctgctgtacatatttttgaaggaactcatgaaaatcctgagttaatttggaatgataattccagagataaagtgtccacaacagttagggaaatgatgctagagtaagtaaaaacaaaggtaataatttatagcctttaaataaaatcactgggaagggcaaacatttcttactgtgcccatcacctctaaaacttatgctaaaggttaatgaaaatgtatttgtgactgaagtttggtatccatccctttttttccccaaggcactttaaaaatcagcaggacaaccctgaggcaaactggaaggtaaaatatacttttattttacatcttattttctgttgatttagttgttttcactttctactgagtcagtttaatgccgacctataactactttgtcatcaagactcttgggtattcccctggaaaataaggcttcaaacataaaaattggaatacttactttcgaagttagtaagggcaccctttctgaactttattaagaaaaaataaaactcataatttgattatattatggctgtttgtggactggttaacattataaacaattctttaatatggtgtgcatttctagcttcaagattattaagtgacttgactgtggttctttctctatttaaagttgcctgaagattttgctgtggtgtttggagaagcagagggtgaacttgctgttggaggagtcttcttgaggatctttattgcacaaccagcctgggttctaagaaagcctagagaatttcttattgccctgttagaaaaattaactgagctcctagagaagaacaatcctcatgtaagcttcagtcaaaagcaaaacatttcaaagacttggctaactagactgatggtgtttctcttacaaccttattcacaaagaccatgaattaggaattggccagctctttcaatatagcagccacatttaaattcacatatgcccctcgatcatttttttgccatgttcaaaagtgaagctctttagtatgtttatgaaccaaagttatagagatatctatattgagaggatgctatttctaacagttacagaagcctgaaaagaaggtttttactgtccatctctaatgaatatgtaattttaaggagaaacctgtgtgttcggtgttcctctgagagtgtgttctgtttgggcatgtgctgcactctactttgtgtatatggcagggataaccctagtcaaagaaattgacagaagagtagtaactatgtggttgaatcctgtatctgtggctgaggctgccaggaaagcaggagtgagtgaaaaggtaactttggtcttgggtttggcaagccaaataccgtgatagtatataagattttgtttttcaaagtcttttttgttttcagaaggtttaagattttgttgagattgaagacagttgacctacatgattgttgtttaaacaggctggctacagaataaggtgattaagagcctgagtggtgttatttgatggttccagccataccactgaccaggtctgtgaccttgggcagtacctcatgactctgcctcagttgctgcatttatagaatagtcatagcagctgcctctgaggcagaggttctgatgagttaatacatatatagaatgcttaacataatgtctggcacatttcaagtgcttagaaattagttactatcattagcttagtaaaacatatttttaaaacatgattagcttgctgagtatttaccagtgctactttccatagtcatattcctccaataggatttctactacatacatagtttgcttggaaaatgcagtcctcaaaagctaaaacttagggaaagcacatagcagtttcctcctatatcacctttctttttggacacattccaattttaatgttaatttaagatgcattttattatgtttctggatgtgtgcatctagtggtataagctgaaggtctttccaatccgttatccacaatagaaagtgctttgtgggagccagacatgttaaatagtaggatttttaatgaaactgggaaaaacatttcactagttctgcattcttctggattattgttctgacactaacatacctgcaacatggtctaaaaatttctagtaatatcatttgggacatgatctcttaaacctgcaatagaggctgggcgcggtggctcacgcctgtaataccagcactttgggaggccaaggcgggcggatcacctgaggtcaggagttcgagaccagcctcaacatggagaaaccccgtctctactaaaaaaaatacaaaattagccaggcgtggtggtgcatgcctgtaatcccagctacttgggaggctgaggcaggagaattgcttgaacctgggaggcagaggttgtggtgagccgagatcgcgccattgcactccagcctgggcaacaagagcgaaactccgtctcaaaaaaaacctgcaatagaaattgggtatacctaaccgagtaaaatcctgcttagattaaaatagcatattcttaaagtcctttagattcatgccttttatgaaagaaaatgggaagttcgttgttctcttaggattagtgaatctgttttcaagtatcagcacttagaacttttgaatccctagttttgaacaccaaatacattaccttggatatttagggctgtatgagtattttatagttgatttatttttgttttacacctgcagggagaaactctggaaaccttgacaatggcaacagtgtgtctcttcagcgcacaacctcagctggcagatcaggtcccgccattgggccatcttcccaaagttatccaggcaatgaatcataggaacaatgccattcctaagagtgccattcgggttatccatgccttgtctgaaaatgaggtattgatgaatacacttagtagtttataagctccagaatttatctatgctcccttcttgacggatataagttgtagtattatataaatcccctttctgccatgtgtctttttgcatacgaaccacatggtattttattagttctgggtttatcaaaactggtatttatcaaatcagttttgataaataccagtttaggtgatataattaatagattaaatttggttcaattcattgttaaactgaaagtaagggattctttttttacttatttacttattttgttatggtatttactatgttatataaatattgccagtctacaagtaaccttctcttttgggcacttagctgtgtgttcgagccatggcatctttagagaccattggcccactgatgaatggaatgaaaaagcgagcagatactgttggtctagcctgtgaagcaattaatcgaatgtttcagaaggagcagagtgaattagtagcacaagtaagtgactttctagatttagcactattttaggaaagcaaacataccaagtagatttttacctatttggtactgatttggtttccttgacttaaggttggtgagagttaacttgtgagtttgtgtataaacaattttatattttatatatacaaacacatacagtagtgtgtataatacgtgtgtatatgtgtatgtatatatacatggatgtttgtgtatatatacacacacacaaaaatggggccagctgccaacagtcttaccaacttgagagtacttttatggtgtataaaatttacattttggctatccattgtgcaattagcttagtagcttgtttagcttgatttgtaaaatgtgcttcatcctctttggaaaaattcattcgtttatttattcctttgtttcttaagtcatgtttaagaaacatgccaagatactgcctttttcaaagagactatccacctaatgaaaactggacttggtggatatccatgtagacagatgttgatggaacaaaaaagatgcaataaatttaaaaacttacaaaagcgatctttctaaaatgtaactcaaagaacaaataccacatgatctgacttgtaagtggagtctaaaacaatcaaacttatgaagcagagagtagaatagtgattactagaggctggggttggggagaatgggaaaatgctggtcaaaaagtacagtttctgttaggaagaataaggcttttaagatctattgtgcattatgttgactatagctaataatacattgtatatttcaaaattggtaagagtaaattttaaatgtttccacaaaaaaataagtatttgtaatggtagatatgctaattagcttgatttattctgcattgtatgcatgtgtcataacatcactttatttcccataaatacatacaataaaaaataataaagtatttaaatagaattctgaaatataactgagccattcttcatcttaaaaaccattcagtggtttctcattacctgccagatgactaagtgacatctggtatccttagccagaatacaaggccctgcatctttattatctgggcttccccttctcccagcccctcagccttacccactggaccctcattgaggcaagtagagctgttgggtacatctcaaggagatactggatgctctaaggttcagacttatgattggcttgaggagtttgatgtgtaggaaagaacatgagctggtactaccacttgttggctctctgacctcagacatgatatttaaccttaaaatgctcagatttctcatctgtaaaataaggttgtgactatctcacaaggttgttatgagaacagtacctgaaaaaagaggtgcattcactaaatgtcttttatttcttcctattccctctgagtttcaaaatggatagtgaaaattgtgacattagattattattcagcttttattaggctgatatgaaatgtacgatgaccacaaagattgatgtttgaagaaaatatgaaaaaatactaatgtatttcagagattgttgcctattaatacagtgttactagggcaggcagcccagtataggggctaaaagctcaggttctatgttttctggctccagatacatattttaatactgcccagctctgtgattatgaacatactgttttaccctctgtgcattaattgaataaaataattgatgtatagcatttagaatggttaatggacagaataaaatctcattaaataaaaatgtcattagatacttaagcctgtgtatggcattaaaatacggtgcaacaggctgccttccaggtaggtcctgggggtaaaattatttcttcagtggatgatttgcattttttctgtgtgtttatatatgcttaatatttcttctaggccctgaaagcagatttggttccatacctcttaaaattactcgaaggcattggccttgaaaacctggacagcccagcagccactaaggctcagattgttaaagctctcaaggcaatgactcgaagtttgcagtatggagaacaggtgagtctgcatagagtcaacttttgatattctaaaagccagggtcttggccatggatggtccacgtacctgtgttcaagttccacttacagatatggttctgttggttgtaactggagaagatccagagcccaaggatggacttgcatacctgcctcataactgatgaaaaagcataaaccatatactcaatattcaggagaattcttctggatagtgatggcatgttgtacatttcaggaagaaaaatgctggaaatctttagcatggaatatgcagcatttagtgctgcttaagattaactttcagctctaggagttattcatgggtagtgataaccaaattcattaaccatcccataatgctattttaaaagatgtagaacatcatttttgttttcatttcctttcttgctggtgcttaaaaagtgttggtttttttttttctttggtcgtgactttgtttttcctatgtgtgttaatgtatttcagctgcacgtatttgctgacttcaggcctgttcagtaatttaattttcctcattggttttatttttattatttcctctaaggagttcctcattcagtgtactatatagccccatctactaatgctcatttttttttaattgacgtgaaatttacatagcataaaattaaccattttatggtgaatagttaagtggcatttaggacattaacagtgttgtacaaacaccaccgtatctagttccaaaacattttcatcacctctgtacccattcagcagctactctccctttcttccttcccccaacctttggcacccaccaatctgttttctgtctctggatttacctcttctgcgtatttcatataaatataatcatacatatgtgaccctttgtgtctatcttgtcatttagcatgtttttaagcatcatccatgttaccaatgcttcatttttatgtctaaatatgtcattgtacgtaaatgctccaatttgtttatccattcatctattgatggacatttgggttatttcccctactaatgttccataggttttaattgacttcagctacagcttcccggtaatgaatttactggatttgtatgtttcaagtaaagaaacatttttcataccattgtcattctatcaatatgatcatttaaatgatttaaaatgatattaggctgggcgcggtggctcacgcctgtaatcccagcactttgggaggccgaggcgggtggatcacgaggtcaggagatcaagaccatcttggctaacacggtgaaaccccgtctctactaaaaatacaaaaaattagccaggcgtggtggcaggcgcctgtagtcccatctactcgggaggctgaggcaggagaatggcgggaacccaggaggcggagcttgcagtaagccgagatagcgccactgcagtccagcctgggtgaaagagcgagactctgtctcaaaaaaaaaaaaaaaaagagatattaaagaagagaggcagcacttctgcagatattaaagaagagactgcagtattgctgcagtcattaactgatgtgtttttagaagtattttcttggtttttgcctatgagtgttctaaatgccaagcaaaggctctcctgcgtaccacttgcagcagttgtcttgtctttgacttgcctcaggattcctggtaatgaaattagcaaagtaatcctgacacccacttcctacacccaagggaggggaggaaagaggtatagtagtttctaaataggaactcccctaccagctttacaactaatcacttccactactgcttctttcccgggttggagcaggtgcccccctcccttggactcacatggtccccttgtataaccctactttaattcttaccacaaaattatttgacgctgtcttccctactagattgtaagcacttcagagacagtctgtctttctcatctttgtgttcactgtgcctaccacataagaggtgctcagtaaatactagatatgaacattgatgtgcaaaagctattcactaaggtggtatttcctaaatgttttgtcacacagaaatgtctttcatcttagtttagtgcatattcccacacatgtattatttatactcatatatgtgtatgtatttcaagtatatacaagtcctcattttacttctgatactctgatgctttctatattgaccaattttgttttttcaacaacactcctgattgtttcataaacctctttaggtcacagctcataatttgaaacactgctttaagttttagctcaatttggctgtaccttctccccaaactccttcctcaggaatagctcatcagcccatacactgtcagccatctgttactgtcacaagaaaatactctgcataggtatcttcctccttgaattacatataagtcggtaattgtaggttcaaataatagagtccagcttcagagggacgactgacttgaggacttctttgggtctgccttaatgagatgtgtctggcatagtgcctgctatggagtgtttgatgaatgctagttcttgctccatatttgggtctttcctcactggccttcttccttgttgctttggaagttggtttttctttttgtcttccaacatccagtccttgattttatgttcaaagggcttgttttactttcctaggtgaatgaaatcctgtgccgttcttcagtctggagtgccttcaaagatcagaaacatgatttgttcatttctgagtcacaaacagcaggatacctcacaggtaagccatacctaattggttattgtaagacacctggcagaagccacttggaccttccttttgccctaaatagacttaaaattgtgttcagagtgtttcttaggctaccagctgacctttcttggaggtgctatgagcatgtagtagacatatggtcttagctttatatagcatgcaaactgttgttgtgttgaatgggtactgactaaagcatgtattttgttcagttttgatccagttaattgggtcatagaatatatttggagcatgtctgtattaaagtatttatcttgtaaagagaaggaataaatatctgctgaggaatatcagtgtcagaaacatgattcatcattccatatctgtcagaataacagattaaaactccaaatatgtataattgtatgtaaaagatattcttggctgggcgcggtggctcacgcctataatcccagcactttgggaagctgaggcgggtgaatcacgaggtcaggagatcgagaccatcctgtctaacacagtgaaaccccatctctactaaaaatacaaaaaattagccaggcgtggtggcgggcacctgtagtcccatctactcgggaggctgaggcaggagaatggtgggaacccgggaggcagagcatgcagtgagccaagattgcgccactgcactccagcctgggcgacagagcaagactctgcctcaaaaaaaaaaaaaagatattctcctaagtttccagtgatttgtttatggttttgctaaatatttagggtgtgtcgttttatgggggtggaatacataggtatcatgaatgaaaggatgttttactgctttggtttcaaaagatactatgtttaaaactcagaacatttgacacactaattgcataattttagaatagtcattttcatataggcttcaacataagtcagactcttgctgaatgctaaagaggcaatatctagtctgctataaaagttcttaatttgaaattaaccttaggaatatgaggcggttcttgctgtctgcctgaaattgtagtatataaaaagatgtcagccctgcattctctcctaaccaaagatgataaactaagagaaaaaattatcacccagggtttctaagccattgtaattgttttaatcttgattgctagtatagaagtttataagatcatgaagactttatcttgaatattcaaaattagaggctttggaggaaattttacctggttttaattttaaacttggtgtgacacttttttttcttcaccataaccactttaatattgacactcctaaagttggagcagagtcctaaaatttataaacatgcagtgctttggctgcaggtcatgtcctgttcagaacagtgtcataggtttttattttaacttttccatcccctgtccctcatatctatggagaaaaatacctagactgtgttctcagtctgtcccatatctctcttcagatttggtgttaaaattatagcttctaagtaggagtttgttcttataggcagtataaaaactttacctctttagcctatgtccaaaagttcacataccacgttttcatggcattacattcattactttttgtataaggatggtatgattgaaaaaaaaatctgccttatttttattttattatttatttttttgagacagtcttgctctctcacccaggctggagtgcagtggtgcgacctcagctcactgcaacctctgctccctggattcaagtgattctcctgcctcagcttcccaagtagctggcattataggcttgcaccaccacacccagctaatttttgtaattattattattattattattattttagtagagacggaattttgccatgttagctatgctggtctcaaactcctgacctcaggtgatccacccacctcggcctcccaaagtgctgggattacaggcgtgagacaccacacctggcttttttttttttttttgcgacggagtctggctctgtcacccaggctggagtgcaatggtgcaatcttggctcactgcaacctctgcctcccaggttcaagccattctcctgcctcagcttcccaagtacttgggatgataggcatgtaccaccatgcccagctaatttttgtatttttagtagaggctggtctcaaactcctgacttcaggtgatctgcccacttcggcttcccaaagcattgggattacaggcgtgagccagcatgcccgccctcttttttttttttttttttttgagacagagtcttggtctgttgcccaggctggagtactacagcatgagctcagctcaccgcaacctttgcctcccgggttcaaacgattctcctgccttagcctcacaagtagctgagattacaggtgtgcaccaccattcccagctaatttttgtatttttagtagagacggggttttgctgtgttggccaggctggtctcggactcctgacctcaaatgatccacccgcctcaaatgatccacccgcctggtactcccaaagtcctgggattacaggtgtgagccactgcacctggtcagccttatttttcttaactaagagtaaattggccctgaagaatagtaatgtgtatattataagcttctctacaggaaagcctcttctaattcttctgttcagtcttatctatcattctttgacttaacttgatgaaataaaaaacatatgtccttgacttacagagtgtgaaccaaaaggtctgtggttagaatccagaagaaataggggtttatcttcagaaacctggacttcatttggtcctcacccccatccacatgctttagtaactatagggaaaaggtataggcagtaaaaagcttcttgtctgtgcctttccttttacttggatccatgcggtggcttctgaatgagatatgaaaagtggctgtgaaggggttagaagaaggttagggaaaaagaaaagttggggtatacaaatttcttcccatccctgagccggcttaagggacagcaagttctgtacaggtctggccaaatggggagatggtataaaacccaaccaggaaggggcatggagataatgagtcttccagaaggccattactgaagcctgcagacgtgtccatgtagaacagtctggataagctgtaagcattgttgaccccagaattgtgaaattctgagcatgttatcaatctgggatgctcttttttagcgatgtcagttgctggaaattttttcatcagctctagtctgtcctatttgaaaggaccaacttgccaggtgcaatggctcatgtctgtaatcccagcaattttggaggccaaggtgggcggactgcttgagtccaggagttccagaccagcgtgggcaacacggcaagaccccgtctctataaaaaaatacaaaaatttagccaggcatgttggtgcatgcctgtagtcccacctactcgggaggctctcttgagcctaggaggtggaggtcacaggtgagctgagctctcaccaccacactccagcctgggcaatagagcaagaccttgtctcaaaaaaaattaagttacattaaaaatgaaagaactatttcaagaattaaagcttctaactcttgctgtctgcctgaaattgtagtatataagatgtcagccctacatcctctaactacagatgatgtaggcaaattaagagataaattaggtaaatttactgccagttggattgatgtgtgctcattgcttgagttgccaaatgttttttgtgtttgagcttttcattgatgtattgtgtatcatgtgtttgataaaaggggcatgtagttctaataatgataaaatcccatgatgtggaactccaggaatttatagtgttgtgttgaattggaatttcatttagttaaaatgtgccccgtgctactcccaaacttcagaagatacagattgtacccagcccctctgtaatcattgaaatcaaggttgctgtgacaacacacatcaccaaccctttcttctaactgatatctttaggtgagtttggcaggttaggtggattttgtttaggacatggggaaagacaaaggagttaattactacttcaaagtaagataaaaatgaccaaaactacgttttcttctctctggctgctgagtaaatgtcattcagtcacatgcccaagatttggggtaaaaattttaaagtcctaggtaggattactcaatcttgataaatttaaatgagactgcctatttccataggttctctagcctggcatattttgttttatgataaatgcttatttaaaggtgcctcagtggaatttttcctgtgatgcagataaattgtggttactcattatccagggcccttgatcacttagccatttattaggttctagaacagcttggtgctgatggtctcagagcctcataaaaaataatttcagcagtgaaaatcctcaaattacctaacctagaaaatcagtagcaaaagaaggaacaacaggaaaaggaacagaggccagggtgaagatgcttctaggagccagaattggagatgaacttttcacatatacatttcatcgtggtagccaattcagttttgtgggattctctgtaaattttccatcttttctcatttctctgaagtccagcagccttgtgcaatcttgccacatgcccattcctggcagcccctgctcttcccatctttctctgaagaacacaactgccctattctgtgcaaatgaccaggcagcaccttttagccccaagaaaccagacacatcctcaaggagaggccagggtcctggggagagcatctcggatttcatttgtagaactatccgggaattgattttgatttgcctttcctaaagaggcaaatgatggtactaaaatttggtttcttccttctaagcccatcatttcaccatttagattttagctcagaggttcccacattttctcagttcacagtgcccttaatagctcagtaattttttcatccgtccccaagccaaaagaaatacctaataatttagtttatgaagtaattgcaagacaacttgaaagtagttgtttgtatggtggtcagcagatggcgctgtgtttcaaatttaaaatacccagcagttagctggatgatgtggcaggcaactgtagtccacatggacaggccgaatccgctactcagtaggctggggtgggaagatcacttgagcctaggagttcaaggcctggataggggagttgcttgagcccaggagttcaaggcaacatagtgagacccccatctgttaaatacacacacacacagaggggcaaagggaataaataaatatccagcaatgccccagggtgcctcagcacacagtttgagaactgcgtcattaatccactttctagatgcagcattcatggtttggtcttgtaacctactattttgatgggaaccaagttgagcccacaatcagaattgctcagaaactacacagtctggagtgtttgaggtcttactgttaagggttacatctttgatgacacctactggatggttttgcagtaatcatgctgcagcctaaagttcagagaatatgagggtggtgggaaatgatcacagggtgctgctgtagctctgaactgcgttgtcagaagggtttgttgacctggtggcctttttcctgagcagactgtgaaaggcctggcatcctgattggctcaaggcaggagttgatagatgcaggctcccacagtaccttaaaaaggagaaatattttttgtaagttctacaagtacaaggtttttataagtacagcgttccaagtacctgggcactctggttggcttcagttacagctcacacaggctgagtcatctctgcctatgtatctatacaagccatttcacatccatagtaccaatacttttaaggtcaaaaacaagatgaatctgaatggtggcctttttgtcctccaccaatccctgtttctaccttcatcaaactactctgctgtttgcacttcctcacaacttcccttgctgcttatatttcttttttcccctcaggtgtctctccttcccttctaactggcagcagcccccttcacctcaggagcgggctttagatccgctctgccaggcagcttgctaacttctgtgtagctctctgaagcaggtagagaaatgttttgctaaatgcatgccgctcccactgcctttctagtcctaaccctcaatgttccttagttgtttgccttgtttcctacaatttcagctaaaactattgctcagtatgcagtattatgctacagtgtcccttgcaagtacttgttagtttgtgcagtgcttctgagatgtaattaaatgtttatgcaatgtttaaaataaactctagagggctaaagccattaatatgcccataggacacatctcgataaatgctggcatatatggcattttcatgcaatagaaactgttagaatcaagggagaaatataagactaaaatatcagtaccctttcacatagcattcttgttttaacctatgacagatggatgtccagagccttttctttttcagagtccttggtttagcaacccttgttcgtttggtgttacttgttataatagcatttctttgcaccaaatgaaaataggttagtttgagtgttgacagaagtgtttatgttgaattttgtcacatatgacttttggatgagctgagtgtagagtttcttttgtctgtctgtttccattttttccattcgacatagttcttttcagtgctcggaattttttgaaagattgaatttcccaaatgtaagaaagaaaattttatccatatttccacaccagtgttactgtccagcatacattttgaaatgatttctagtctatagtgtaggcaaacatgaaaatagtactatgtagctgtttattaaggtatagatgtaatttaggtaattgaaatagatgattagttttgtgtgatggagtgcctgagcaggttctgacatttttataaaggtcaatgttttcacttgactgctttctagaggtgtgtgtttacctttctctcttgcaggacctggagttgctggctaccttaccgcaggtacatctacatcagtcatgtctaacctgccacctcctgtagaccatgaggcaggcgaccttggctatcagacttgaaatattcacgagagacaataaacgctgaaaggccagtgccaagtccacattcctccagctgatacgttgaagcaaactcttactgcctttctcctggtttcatgacagtgttattcctttttctataaatatatttttaggaaaaaaagtcagtgatcctaattgtatcacattataagaaagcactctgtggatcaacataagtgggtacacaagaattttttttttcttggtgtatgtaagcacatttgttcctttatatctgtttacaaaactgtgaatcaaaaagacaaaactttcttcctagtttttgtaattttttttttgaactagcatgactgtagggttgagctacagtcaacaaaaattgggctaagtcacttttccccaggaaagaatatttccctctcctgcatcaagtctgcgtggccatcctccccccaccatccaagactattaggttttgtccctgcacccttcactggcatcctcaatcattaaccttctgaaagctcacagtacacattagtatgtataactggctttaccaaattgaatgaaaaggagcttgtgcaaaaaaatttaaaaatggatgtcaagatgttatgtaaaagatgagtgtaattgtgaaatgttctatacactatcaaatatataaagctttctatattgaatgtacattatacagatcattcatatgtgtacataaaattttaaaaataaagggaattgactgctttgttaatgagatatatttgttctagtttaatctttccgtttgaagacctcatatatctatctttatttctaagacagatgtagtattaaacagacgttatcttacattcgtaactcttcatatagatggctgcattaacataatctaatcattcctaactttaatatttcagccacatctaagtttccagacacagcatctcatttatttttcatacaacattcaggaatgggtcaggctgttaataatatgtgacattaattctactatttttaagaagagaaaattaaatagccagaagatttttcaagtaacaaatctcagcacatagattttctagtgtgaccacaaactacaagaaaatataaacatggagaatataaacaaacagttcttaaagaatggggaaatacccacacttccaagtttcctttcaaagcaagaaccaagtttattccacagttgatgtgtaagaacagccaaaatggaaacttactcctattccaaatcactaattcaaacttctgcatcaagtttatcatctctaacagattatagagtaatatgttaatggaagtattttaatatgtaactagggttttagtttctagacaatagttgggtataaaaatgtgttcactaaaaaattataacagctaaattgggattaggtatttaggagagcataaatcaacatagcaatgttttcttttaaatactaagaatataagtattgtgaatacaatagttaaaggcccgttaaattagtctacgatcattgatgtttagatgccaacaatacttaacctttattgaatatttactgtctgctaagtattgcataatctcatttaatcctcagaacgaacctgtgggccagttaatcctcagagcaaacctgttggcctggtactgatataattcccatcttccaggtgaagaacatgaggttcagataagtaaagcagcttactaaaagtcacacaactagtaagtaacagagtaagaaatcaaaactcttatgtgacactgaggtctgtattctgagccataatatgaagacaacagcaatgtcaggcaagtgtctgtgatggggaaagctgagttttgatctttgagggtggaggctttatctgagatttaagcatgaagtcgtttgcctcagtcctgagttataaaagacagcttgagcagggtaacaggaaagtatatataggacacctggaggggtgggggttgtctggtatggctgggggataagggtccagagagaacccagcctgagacccagggaggagccagctggacggtgtcctaagtgccaagctgacgcattaacatcaaacctaatagtgattcaggaatgagatctgtattttaaaataaacagcagtgtggaatgatcactttggtgcgtttgttgggagaggggctgtttagaggtagcaaaactcagagatacactctagtaacccacagtccatctaaggagcagtgcagaggcagaacactggaaatgggcaagagaccatgccggaccctcgtccgtccactgaggatcatcaccagatgctcagctcaagaatccctttcagtctagaacttctgtgatccttctcatgcttaaattgttcattatatgatgaatatcgtgtaaataagctttattaggattttgagaagagcactgtgaaaaaaaagttgcagataaactttcttgcaacctactctgactaggaatttcaccgcctccttgagtttttgggaaggcatggccctccttttactggccagtagcagtgtgaccaaggaaggcagacttctttgtttccttatctataaggttcattctgagcccattcctcaaaggggtgttatgagaattaaataggggtgttataaggccaaaaaaatcaaattcattccccttgcaataagataaaaaccagtggttatgaggaattggatgtatgtgctttctgtccaatgagttattaattaggtattcttttaaaagactgaactccttttgcaatatgtagttgcatggtcacatgtgtgctcatgccacttttgtgatgggagaggggaggacaaggacttcggggaagttagtcattagggactaaatggttgtatcttcccccaaaattcatagggtgagaccctaacccccagtggtatttggagatggggcctcagggaggtaattaattagtgttagatgaggtcatgaaggtagtgccctcataatggggataataccttagacaccagagagcctacctgtacccccaaattcccccactacctcctttcccaacacctgacattctgcaccaagaggtcacgtaagcacactgggagccacgtacaagccaagagaagaggcctcagaatgaaagctaacttgctggcacattgatcttaaacttcccagcctccagaactgtgagaaataaatttgttgtttaagccaccagtctatggtattttgttatgacagtccaagcagactaatacatagtgttcgctggagcaccagtagcaagaagagagtttgctcatagattggtaggacaaagggctggttagagccagagccacctcagccttgatgggacttggtataaattcagctcaagcaccttcagaaacaactgacagcctgtcctgaagctggggaggcagacccctaaggctggcccacagcacacaccaaaacttggaatgcccactaagttagaactaggtgactgcctggctcctgggagtgtttccagttttttgtttgtttgtttttgagtacatgttaagttttgagtatccaagttatatcagaaatcacgcctggatgcccaaggtgttgattctaaatcagaatcactgctggatgcccaagatattgattccatcctcatattaaccccaaatgtttgtgtggattttggttgaattcagtgtttaactcattaacttgtgtcacccagtctgtttaaattagggcaggagaatggaagtaaggtatcttggagctggtatggaccgagttggggccacctgggctgtggttctggcctccaccaagtgaccttggagctgtcaccaataagtgggggtcattaatgtctcctttgtggggatgttcgggagatcaggaataatagatgtaaacacctaatagggtgtcaaccttgtagacaggagcgtctaggaatgaggagctgggcttggtgatgctgtgtcaaggaagaacactggcttgtcaggcagattctgccctgcttaggtttctgacattgggcgttaatttcatctataaaatgcctgatctggtcaggaaatcttactttggtaagatgttaagaatctgttgaaatacgtgtaaaacctttatgcaaaaatgcccaaaagcgcatattttaaaaatatccgaaaactcagtcccattctcgccccagttaaaaacctcagaactagatcacttcccagaattattgtttcccatagatgattttttgtgaaataaattatttaactcctctattgtagtggaaacttcaggcatttctcctgtcatcaatgctttcccattactagttgttactacatgtgttgtttaatatgttatttagcatttaaagcaaagaacttcacatctggattattgaccactaatttctaaacttaaggagtaaaaggtgggtgaggttactgtgggttccagggccccaagaatacaggaaatagggtggccagtttaaaacgtttgttttgccatcaagcttatgaaagaagatctgtacatttccatcatttttacaaatccccaatttaaggaaataactttgtaagagaagagaaagacccagagctgttcatgaaaactctgttatttacacaaataagaatgttcgtgcttaaattttttaacattgaaaaggaatatggtttataagttatgcagttatgtatgaagagttttcagctattgtccaatggcagtagataaaaaaaacctaaggtctacaaagaacattggcctcattccctgacccctaaccaatgtctgtgagcaggaaaagaggaacctcatgccctcagtctctacttcagggaaaagtttacgaagatgtggcttgagtcaatgaaagaatgagtcatttgtcttcaaaaggaaaggtcatatggaagtaattctacaaatatttagctatgcataagttcaggaaagtcatttcacttacttaagctcaaacctcaatctcacattttagtattttacacaactcaaaatagcctttcgtatgtatgtatcaggtttcccagcattccaaagcaggaagtggaacatttttcccagctttaaaggtaagagctgacctgaggacaatcctgtcagccctaaaatgatcaaggtgaattcagagtaagcaaatctagagtttggagcagaaaactttatcaactgatacaacagctggatgatagcacacccttccagtggcagggacttgcctaaagcaactgagcattgtggagagcctttgaaggcagcccttagtgtgaatgctgacaggtgtatgcctccaggtatgacagtagaagcagaaaagaggccaaaacaggaagaaaaaaaggaaattttggaggacactaggaagaagaaagcattggaaaagaaagctgtataaccataccctcagagataagcattgcatctacaaaacaggatgccactttgaaaaaaaatttttttccacagaaaatcaggtcttaaaaattttttaataaaaatagaagaaaaacaatagaagacattgacagagaaagttgaggaaatcttgtgaagaagcagagtaagatggaaaagtagacaaaagagacccagttcagggagcccattatctaaaaaatttagatcccaaaagaaatactagttttgaaaaggggctgagaacaaaataaaaaattcaagcactttcccagtaaggaagactatgccactgaagaggccaaaggaacttctccttcaccctctgaaaggtctgctgaaaaatcaacttgcaaaatgcagaataattggagaaaaggcatacaaatttatttaatgagtatacacaggagccttcagaatgaaagcccaaagatcctggggaaattgttcactttgatgcttaggttcaacaaaatattgacagccatactttgattggctgtgtttatgattggacaaaagggtaagatcaaatgctaagggactgcatggggaaacccagcaaggtctgtttagactcttcttggcctatccgagcatgcagtccttccttctgggtatggggcgggtctttctctggaataggggtcctctgagctatagtccaacaaggtaagtcagatcatttctttgtggccagtttttacatagaaaggtggagggaaagggtaataactttaggttttatggctggctttggggaaaagaggttctggtttctgacccaccttggggaagagagattctagtttctgtggctagccttgggagagaatggaactgagcgacaggaaggtaggagaaggtcagaaaaacttctggttctgaggctgcttctgagaccttcattctggggtttgttttatgagtcccaatgtcagaggtgtttgaaccagagtgactccaccttgaataggggctgggtaatataaggctgagacctgctgggctgcacccccgggaggttaggcattctcaggcacaggataagacaggaggacaacaggactggtatcacagatacaggtcataaagaccctgctaataaacaggatgtagtaaagaagccgccaaaacccaccaaaaccaagatggcaatgaaagtgacctctggtggtcctcactgctcattatacactataatatattagcatcgcaaatcattcccaccagcaccatgacagtttacaaataccatggcaacatccagaagttaccctatattgtctaaaaagggaattttctggaaaactcacgaataatccaccccttgtttagcgtatgatcaagaaataactataaaaatagctggccaggcacggtggctcattcctgtaatcccagtactttgggaggcagaggtgggtggatcacaaggtcaggagttcaagactagcctggccaagatggcaaaaccccgtctctactaaaaatacaaacaaaaagtagctgggcgtggtggtgtgcacctgtaatcccagctactcaggaggctaaggcaggagcatcacttgaacctgggcggtagaggttgcagtgagccaagatcatgccactgcactccagcctgggccacagagcaagactacgtctcaaaaaaaaaaaaaaaaaaaaaatagccaaccagcagccctcagggctactctgtctatggagtagccattcttttgtttcttctctaataaactagctttcactttatggatttatcctgaattatttcttgtgtgagatccaagaaccgtctcttggggtctggatcaggacctctttccagtaacaccaacgccaccgagtgccagcccaataaatgaaagtcaacccttacaaatacacataattgtgaaattttaccatatgaaaacaaaaagatcctataaccctccagggtgtggcaggagaagagggaaccatttcttagaaaggaacaagaataagaatagcactggattgctcaataacactgaaagaaaacaagggagtgatgccttcaaaaatctcaacccagggttctacatccagtgaaactactgattgaggggacagaattaagacaaggtctcaaatttacctcccattaattcttttgtaagaagctccagaaagatgttctgtactaaagcagggggtacccaaaaaagtgtgggggccaagatgtaaacttgcctgtcaccctctgaaggttcactgaaaatcagctgacataaggcagatgaataggagagaaagcatacaaatttattaacgtgtacctgtggtcccagctactcgggaagctgaggtggaggatcacttgagcctgcagtttgaggctgcagtttgagctatgatcatgccactctactccagcctgggcaacaggcaagaattggtctaaaagaaaaaaaaaaaaaaaaaacagactttacagggtatgtcaaagaagtatatttgggggtgaaatactttggttttcttcaaaagaatggtggaattcttcaaatgatattgaaaagccatttcaaattaagacaacaggttgcagctaacttagacaactacccatccagacttgaacaggttagaggctctgggaacaaattcttcaagaagatgaaattgataggcaatatatgtatttgaacatattgagagaaaagaaattgatgtatctgggagaagagtttggaatagctgggcaacaaaataatcatagcacatcttctaaactgagaaatcaatagatgactagactacatatgacagtaatgtttcatcaaggtcaaattctcgtgtcattattgttaggtgacatactatctgcagctaactcagttcagaaacaggagagagaaagcaagtgtgaatctagataaggatatacaggtgttcactatattcttcctctaactgaagatttaagtaaaataaaccattgagaggtgagagtattataactgtattatttcaagacatggaagtagatctccatgcttatcagttagcttaaattgttttgtttatttatttaattttgaggtggggtctcattatgttatgcagactaggctcaagcaattcttccacctcagcctccagagtagctgggactgttaccagaaaaggggttttgtcccagggcccaagagtgggttctcagatctcgcatgggaaagaattcagggccagtcacatagtaaagttaaaatagtttattagaaactactctgtgacagagtagggtgtcctcagaaagcaagacgaagaatgcgcctaccttaacccatttatgcctcaggttgcaattttttgaatttttgcaatcagaccttggtgatgaccttgagcagtaggatataaataactctcgcatgcttagcgttccaataatggaacattaggtataaatggatttaaacaagaatgcttgcttatataggaatattaggcctatagtgcagtttattataaaggcttgtgacaggctgttagtatggttattctcttgtgtaacttctgatcttggcaagaatttatgagtgtactattatctttagaggaaaacatattttttaaactaagaatgcctttttccactaacttgtttcctcaaccataaacatcttgtgattaagagtgcctaacttcctgggaatataatgcatcaggtcttgctttatccagcctttattcaagatagagtcactctggttgggatgcctctgacagagctataggggcccagctatactaaatgtttttaagtcgttgctcatgggaatgagaaattagcatgttgggatggtgagaggaagaaccactgatgattttcataactagctttggacagtaatttgatggttgaactctgaaatatatatctttgattaaaaataaaaactaaactataaaaaaaattaaggagaaattaaaaatcagtaaaaccgaaacaaaaattagcagcttttgtacatgcaatgcaaacaatgtgtggtaaatataatagaaaaaaaggcaacattaaattggttaaaaaaaaattcagaaacaatttttttttaaccaattgaatgttgcctttccaaaactacctatggcctgcctcacctccatcctgtgcctataaagaccccagactcagttggtagaggagagagaggtggcttgattttagtgaggtggcttcacttcagtgaggcagcttgacatcagagagacagcctgacttcagagaagagctggccagactttggggaagagatgctggatttcaggggaagactacctgcccatcccatcccctcttcagctccccctctctgctgagagccatttccatctctcttaataaaattgtctgccttcaccatccttcaagtgttcatgcaacttcattcttcttggacactggacaagagcttgggacccaccaaactgcagggacccacaaaaagtctgtcacaccaatggaggaagtagactgccaaggtcaacaggtttatgttgatcagcctgagaaccagcagccatgaccacatgtgtaagcaggctgtgaaaggagctcatttgctcctctgggggaaggggagcttacttttccgcacagggaccatccacatctgatgagcaggccatccctccagccttacgtcatggctgagttccttaacagcagaaagttcgtttggcctttttgtggacagagatgggagttacaatggtctaaactgaatgaaatgcagcaagtaagcccttccgggaccatttcccctgaagccaaaaaccttattatgaacaattttccagagggtagcttgggaaagaataatgattaccagtttgatttttttttttttttttgagacaggatctcactcctgtcacctaggctggagtgcagtgacgtgatcacagctcactgcagccttgacttcccaggctcaggtgatcctcccactgcagcctcctgagtagctgggactacaggcatgtgccaccacaactggctaattttttatatttttagtagatatagggtttcaccatgttgtccaggctggtcttgaactcctgggctcaagcaatctgcctgcctcagcctcctaaagtgctgggattacaggtgtgagccactgcacccagcccggttttgaattttataaaaaatgttttctccatttcccatgacaagttcattctgaatcccactgaattgggaagagtctttggctcataaatcaactatgtaatctca

SEQ ID NO: 2428 - DNA, 4408 bp, Homo sapiens
agcttaagtggtgtctcttagccagtggacaggctgtcctgaatgaaactgaccttgctacccttatattgaacatgttgatcacaatgtgtggatattttccaagcagggatcaagacaatgccatcattcggcctctacccaaagtgaaaagactgctgtcagatagcacttgccttccccatattattcagctactgctgacctttgaccctatccttgttgagaaggttgctattttgttataccatatcatgcaagataacccacagttaccccgcctttatctgagtggagtatttttctttatcatgatgtacacaggttccaatgtgcttcctgttgctcgatttttgaaatacacacataccaaacaggctttcaagtcagaagagacaaaaggacaagatatttttcagagaagtatacttgggcacattctacctgaagcaatggtttgttacttagaaaattatgaacctgaaaagttttctgagatttttctaggagaatttgatactccagaagcaatctggagcagtgaaatgaggcgcctgatgatagagaagattgctgcccatctcgcggatttcacacctcgtcttcagagtaacacaagagcactttatcagtattgccccattcctataatcaactatccacaactcgaaaatgaactattttgtaatatttattacctcaaacaactgtgtgatacactccggtttccagattggccaattaaagacccggttaagcttctaaaagatacccttgatgcctggaagaaagaagtagaaaagaagccacctatgatgtcaatagatgatgcttatgaagtgcttaatctgcctcaaggacagggaccgcatgatgagagcaagattaggaaagcttacttcagacttgcacaaaagtaccaccctgataagaatccagaagggagggacatgtttgaaaaagtaaataaagcatatgaatttttatgtaccaaatcagcaaaaatagtggatgggccagatccagagaatataattttaattctaaaaacacagagcatcctcttcaaccgtcataaagaagatttacagccttataaatatgcaggataccccatgcttattcggactataacaatggaaacttcagatgacctccttttctcaaaagaatcaccattgttgcctgcggctacagagctagctttccatactgtcaactgttcagccctcaatgctgaagagctcagaagagagaatggactagaggtgttacaagaggcatttagtcgctgtgtggctgtcttgactcgtgctagtaaaccaagtgacatgtcagtacaggtgtgtggatacataagtaaatgctacagtgtggctgctcagtttgaggaatgccgagagaagatcacggaaatgcctagcatcatcaaggatctctgtcgggtactatattttggcaagagtattccccgcgtagctgctcttggggtagaatgtgtcagttcttttgctgtggatttctggctacagacacacctatttcaggctggaattttgtggtatctccttggttttctgtttaattatgactacacactagaagagagtggcattcagaaaagtgaagaaacaaaccagcaggaggtagcaaacagccttgccaaactgagtgtccatgctctgagtcgccttggagggtatttggctgaagaacaagcaactccagaaaatccaaccataaggaaaagcttagctggcatgctgacaccctatgttgctagaaaacttgctgtggctagtgtgactgagattttgaagatgcttaacagcaacacagaaagtccatatttgatatggaacaattctacaagagcagaattacttgaatttcttgaatcccaacaagaaaacatgattaaaaaaggtgattgtgacaaaacttatggatcagaatttgtctacagtgatcatgccaaagaacttattgtaggggagatttttgttagggtgtataatgaagttcctactttccaactggaggttccaaaagcatttgctgcaagtctcttggattatataggctcgcaggcccaatacttgcacacattcatggccatcacacacgcggcaaaagtggagtcagagcaacatggagatcgcttaccgagagtagaaatggctttggaggctctgagaaatgtcataaaatacaatccaggttctgagagtgaatgcattgggcactttaagttgatattttctcttctccgagttcatggagctggtcaagtgcagcagttggctttagaggttgtgaatatagtgacatctaaccaagactgtgtcaacaatattgctgaatcaatggttttgtccagtttattggctcttctacattcattgccatcaagtcgtcagcttgttctggaaactctttatgctttgacatcgagtacaaaaataatcaaagaagcaatggcaaagggtgctttgatctatttactggatatgttctgcaattcaacacatccacaggttcgagcccaaacagcagaactttttgccaaaatgacagcagataaactgataggtccaaaggttcgaattacgttaatgaaatttctaccaagcgttttcatggatgctatgagagacaatcctgaagctgctgtacatatttttgaaggaactcatgaaaatcctgagttaatttggaatgataattccagagataaagtgtccacaacagttagggaaatgatgctagagcactttaaaaatcagcaggacaaccctgaggcaaactggaagttgcctgaagattttgctgtggtgtttggagaagcagagggtgaacttgctgttggaggagtcttcttgaggatctttattgcacaaccagcctgggttctaagaaagcctagagaatttcttattgccctgttagaaaaattaactgagctcctagagaagaacaatcctcatggagaaactctggaaaccttgacaatggcaacagtgtgtctcttcagcgcacaacctcagctggcagatcaggtcccgccattgggccatcttcccaaagttatccaggcaatgaatcataggaacaatgccattcctaagagtgccattcgggttatccatgccttgtctgaaaatgagctgtgtgttcgagccatggcatctttagagaccattggcccactgatgaatggaatgaaaaagcgagcagatactgttggtctagcctgtgaagcaattaatcgaatgtttcagaaggagcagagtgaattagtagcacaagccctgaaagcagatttggttccatacctcttaaaattactcgaaggcattggccttgaaaacctggacagcccagcagccactaaggctcagattgttaaagctctcaaggcaatgactcgaagtttgcagtatggagaacaggtgaatgaaatcctgtgccgttcttcagtctggagtgccttcaaagatcagaaacatgatttgttcatttctgagtcacaaacagcaggatacctcacaggacctggagttgctggctaccttaccgcaggtacatctacatcagtcatgtctaacctgccacctcctgtagaccatgaggcaggcgaccttggctatcagacttgaaatattcacgagagacaataaacgctgaaaggccagtgccaagtccacattcctccagctgatacgttgaagcaaactcttactgcctttctcctggtttcatgacagtgttattcctttttctataaatatatttttaggaaaaaaagtcagtgatcctaattgtatcacattataagaaagcactctgtggatcaacataagtgggtacacaagaattttttttttcttggtgtatgtaagcacatttgttcctttatatctgtttacaaaactgtgaatcaaaaagacaaaactttcttcctagtttttgtaattttttttttgaactagcatgactgtagggttgagctacagtcaacaaaaattgggctaagtcacttttccccaggaaagaatatttccctctcctgcatcaagtctgcgtggccatcctccccccaccatccaagactattaggttttgtccctgcacccttcactggcatcctcaatcattaaccttctgaaagctcacagtacacattagtatgtataactggctttaccaaattgaatgaaaaggagcttgtgcaaaaaaatttaaaaatggatgtcaagatgttatgtaaaagatgagtgtaattgtgaaatgttctatacactatcaaatatataaagctttctatattgaatgtacattatacagatcattcatatgtgtacataaaattttaaaaataaagggaattgactgctttgttaatgag

SEQ ID NO: 2429 - protein, 1190 aa, Homo sapiens
MLITMCGYFPSRDQDNAIIRPLPKVKRLLSDSTCLPHIIQLLLTFDPILVEKVAILLYHIMQDNPQLPRLYLSGVFFFIMMYTGSNVLPVARFLKYTHTKQAFKSEETKGQDIFQRSILGHILPEAMVCYLENYEPEKFSEIFLGEFDTPEAIWSSEMRRLMIEKIAAHLADFTPRLQSNTRALYQYCPIPIINYPQLENELFCNIYYLKQLCDTLRFPDWPIKDPVKLLKDTLDAWKKEVEKKPPMMSIDDAYEVLNLPQGQGPHDESKIRKAYFRLAQKYHPDKNPEGRDMFEKVNKAYEFLCTKSAKIVDGPDPENIILILKTQSILFNRHKEDLQPYKYAGYPMLIRTITMSDDLLFSKESPLLPAATELAFHTVNCSALNAEELRRENGLEVLQEAFSRCVAVLTRASKPSDMSVQVCGYISKCVAAQFEECREKITEMPSIIKDLCRVLYFGKSIPRVAALGVECVSSFAVDFWLQTHLFQAGILWYLLGFLFNYDYTLEESGIQKSEETNQQEVANSLAKLSVHALSRLGGYLAEEQATPENPTIRKSLAGMLTPYVARKLAVASVTEILKMLNSNTESPYLIWNNSTRAELLEFLESQQENMIKKGDCDKTYGSEFVYSDHAKELIVGEIFVRVYNEVPTFQLEVPKAFAASLLDYIGSQAQYLHTFMAITHAAKVESEQHGDRLPRVEMALEALRNVIKYNPGSESECIGHFKLIFSLLRVHGAGQVQQLALEVVNIVTSNQDCVNNIAESMVLSSLLALLHSLPSSRQLVLETLYALTSSTKIIKEAMAKGALIYLLDMFCNSTHPQVRAQTAELFAKMTADKLIGPKVRITLMKFLPSVFMDAMRDNPEAAVHIFEGTHENPELIWNDNSRDKVSTTVREMMLEHFKNQQDNPEANWKLPEDFAVVFGEAEGELAVGGVFLRIFIAQPAWVLRKPREFLIALLEKLTELLEKNNPHGETLETLTMATVCLFSAQPQLADQVPPLGHLPKVIQAMNHRNNAIPKSAIRVIHALSENELCVRAMASLETIGPLMNGMKKRADTVGLACEAINRMFQKEQSELVAQALKADLVPYLLKLLEGIGLENLDSPAATKAQIVKALKAMTRSLQYGEQVNEILCRSSVWSAFKDQKHDLFISESQTAGYLTGPGVAGYLTAGTSTSVMSNLPPPVDHEAGDLGYQT

SEQ ID NO: 2430 - DNA, 7492 bp, Homo sapiens
gagccggcggcgggaggagctagggctggagcctctccagcctcccgcgaaggtttgagcacaaaatgaacataattagggaaaataaggatctggcatgtttctacacaacaaaacattcatggagggggaagtataagcgtgtcttttcagttggaactcatgcgattactacatataatcccaataccttagaagtaacaaatcagtggccttatggagacatttgcagcatcagccctgttggaaaaggacaaggaacggagttcaacctcacatttcgtaaaggcagtggaaaaaagtcagaaactttaaaattttctacagagcacagaacagaacttcttacagaagcattgagatacaactgctataagcatcactggagtgactcaagaaaacctgtaattttggaagtaactccaggaggctttgaccaaattaatcctgcaaccaacagagtactctgttcctatgactatagaaatattgaaggatttgtagatctctcagattatcaaggaggattttgtatactttatggaggatttagtagattgcatttatttgcgtcagagcaaagagaagagattattaaaagtgcaatagaccatgctggtaactacataggtatttcattgcggatcaggaaagagcctttagaattcgagcaatatttgaatcttcgctttggaaaatacagcactgatgaatccatcacatctttagcagagtttgtagtccaaaaaatatcacctagacattcggagcctgttaaaagagttctagcacttacagaaacatgtttagtagaacgtgatccggcaacctataatattgcaacattgaagcctttaggagaagtatttgcgttggtctgtgactcagaaaatccacaactttttaccattgaatttataaaagggcaagtacggaaatattcttcaacagagagagattccttattagcaagtttgctggatggagtaagagcctctggtaatagagatgtttgtgtaaaaatgacaccaacccataaaggtcagcgatgggggttactcagcatgcctgttgatgaggaagtagagagccttcacctcaggttcttagctacgcctccaaatggcaactttgcagatgctgtattcaggttcaatgctaatatttcatacagtggagtcctacatgcagtaacacaagatggtctcttctcagaaaacaaagaaaaactgatcaataatgccataacagcattactgtcccaagaaggggatgtcgttgcttcaaatgcggaacttgagagtcagttccaggctgtgaggaggcttgtggcatccaaagctggtttcctggctttcactcagcttccaaagtttcgcgagcgtctaggggtgaaggtagtaaaagcactcaaaagaagcaacaacggaataatccatgcagcagttgatatgctttgtgcccttatgtgtcccatgcatgatgactatgacttaagacaagaacagttgaacaaagcttctcttctctcgtcaaagaagtttctggaaaacttactggagaaatttaattcccatgtggatcatgggactggtgccctagttattagttcgctcttggacttccttacctttgccctctgtgctccatatagtgagacaactgaagggcagcagtttgatatgctcttggagatggtagcatccaatggaagaaccctttttaaactttttcagcatccttccatggcaataataaaaggagctgggttggttatgaaggcaataatagaggaaggtgataaagaaattgctacaaaaatgcaggagcttgccctaagtgaaggtgccttacctcgacacttgcatactgcgatgtttacaataagctcagatcaaaggatgcttacaaatagacagctaagtagacatttagtgggactctggacagctgataatgcaactgcaacaaacttgttgaaacgcattttgccgccaggcttgctggcatacttggaaagctcagatctcgtacctgagaaggatgctgatcggatgcatgttagagacaatgtgaaaatagcaatggatcagtatggaaaatttaataaagttccagagtggcaaagactagctggaaaagctgctaaagaagttgaaaaatttgccaaagaaaaagtggatcttgtattgatgcactggagggataggatgggcattgctcaaaaagagaatataaatcagaagccagtggttcttcgaaagagaagacaaagaataaaaatagaagcaaattgggatctcttctattataggtttggtcaagaccatgccaggtcaaaccttatttggaatttcaaaacacgagaagaactgaaagatactcttgaatctgaaatgagagcatttaatattgacagagaacttggaagtgcaaatgtgatctcctggaaccaccatgagtttgaggttaaatatgagtgcctggcagaggaaattaaaataggagactattacctgagattactattggaggaagatgagaatgaagaaagtggatcaattaagagatcgtatgaatttttcaatgagctttatcatcgcttcttgctcaccccaaaagtaaacatgaagtgtttatgtttacaagcccttgctattgtttatggcagatgtcacgaagaaataggaccttttacagataccagatatatcattggaatgttagagaggtgcacagataaacttgaacgagataggttgattctcttccttaacaagttgatccttaataagaaaaatgttaaggatctcatggattcaaatggaataagaatccttgtggacttgcttacccttgcacatctccatgtaagccgagctacagtaccactgcaagtacgtatccttagcaatgtaattgaagctgctccagatatgaaaagagagagtgaaaaggaatggtattttggcaacgcagacaaagaaaggagtggcccgtatggatttcatgagatgcaagaattgtggaccaaaggaatgttaaatgcaaaaaccagatgctgggctcaaggcatggatggatggcgaccacttcagtccataccccagcttaagtggtgtctcttagccagtggacaggctgtcctgaatgaaactgaccttgctacccttatattgaacatgttgatcacaatgtgtggatattttccaagcagggatcaagacaatgccatcattcggcctctacccaaagtgaaaagactgctgtcagatagcacttgccttccccatattattcagctactgctgacctttgaccctatccttgttgagaaggttgctattttgttataccatatcatgcaagataacccacagttaccccgcctttatctgagtggagtatttttctttatcatgatgtacacaggttccaatgtgcttcctgttgctcgatttttgaaatacacacataccaaacaggctttcaagtcagaagagagaagtatacttgggcacattctacctgaagcaatggtttgttacttagaaaattatgaacctgaaaagttttctgagatttttctaggagaatttgatactccagaagcaatctggagcagtgaaatgaggcgcctgatgatagagaagattgctgcccatctcgcggatttcacacctcgtcttcagagtaacacaagagcactttatcagtattgccccattcctataatcaactatccacaactcgaaaatgaactattttgtaatatttattacctcaaacaactgtgtgatacactccggtttccagattggccaattaaagacccggttaagcttctaaaagatacccttgatgcctggaagaaagaagtagaaaagaagccacctatgatgtcaatagatgatgcttatgaagtgcttaatctgcctcaaggacagggaccgcatgatgagagcaagattaggaaagcttacttcagacttgcacaaaagtaccaccctgataagaatccagaagggagggacatgtttgaaaaagtaaataaagcatatgaatttttatgtaccaaatcagcaaaaatagtggatgggccagatccagagaatataattttaattctaaaaacacagagcatcctcttcaaccgtcataaagaagatttacagccttataaatatgcaggataccccatgcttattcggactataacaatggaaacttcagatgacctccttttctcaaaagaatcaccattgttgcctgcggctacagagctagctttccatactgtcaactgttcagccctcaatgctgaagagctcagaagagagaatggactagaggtgttacaagaggcatttagtcgctgtgtggctgtcttgactcgtgctagtaaaccaagtgacatgtcagtacaggtgtgtggatacataagtaaatgctacagtgtggctgctcagtttgaggaatgccgagagaagatcacggaaatgcctagcatcatcaaggatctctgtcgggtactatattttggcaagagtattccccgcgtagctgctcttggggtagaatgtgtcagttcttttgctgtggatttctggctacagacacacctatttcaggctggaattttgtggtatctccttggttttctgtttaattatgactacacactagaagagagtggcattcagaaaagtgaagaaacaaaccagcaggaggtagcaaacagccttgccaaactgagtgtccatgctctgagtcgccttggagggtatttggctgaagaacaagcaactccagaaaatccaaccataaggaaaagcttagctggcatgctgacaccctatgttgctagaaaacttgctgtggctagtgtgactgagattttgaagatgcttaacagcaacacagaaagtccatatttgatatggaacaattctacaagagcagaattacttgaatttcttgaatcccaacaagaaaacatgattaaaaaaggtgattgtgacaaaacttatggatcagaatttgtctacagtgatcatgccaaagaacttattgtaggggagatttttgttagggtgtataatgaagttcctactttccaactggaggttccaaaagcatttgctgcaagtctcttggattatataggctcgcaggcccaatacttgcacacattcatggccatcacacacgcggcaaaagtggagtcagagcaacatggagatcgcttaccgagagtagaaatggctttggaggctctgagaaatgtcataaaatacaatccaggttctgagagtgaatgcattgggcactttaagttgatattttctcttctccgagttcatggagctggtcaagtgcagcagttggctttagaggttgtgaatatagtgacatctaaccaagactgtgtcaacaatattgctgaatcaatggttttgtccagtttattggctcttctacattcattgccatcaagtcgtcagcttgttctggaaactctttatgctttgacatcgagtacaaaaataatcaaagaagcaatggcaaagggtgctttgatctatttactggatatgttctgcaattcaacacatccacaggttcgagcccaaacagcagaactttttgccaaaatgacagcagataaactgataggtccaaaggttcgaattacgttaatgaaatttctaccaagcgttttcatggatgctatgagagacaatcctgaagctgctgtacatatttttgaaggaactcatgaaaatcctgagttaatttggaatgataattccagagataaagtgtccacaacagttagggaaatgatgctagagcactttaaaaatcagcaggacaaccctgaggcaaactggaagttgcctgaagattttgctgtggtgtttggagaagcagagggtgaacttgctgttggaggagtcttcttgaggatctttattgcacaaccagcctgggttctaagaaagcctagagaatttcttattgccctgttagaaaaattaactgagctcctagagaagaacaatcctcatggagaaactctggaaaccttgacaatggcaacagtgtgtctcttcagcgcacaacctcagctggcagatcaggtcccgccattgggccatcttcccaaagttatccaggcaatgaatcataggaacaatgccattcctaagagtgccattcgggttatccatgccttgtctgaaaatgagctgtgtgttcgagccatggcatctttagagaccattggcccactgatgaatggaatgaaaaagcgagcagatactgttggtctagcctgtgaagcaattaatcgaatgtttcagaaggagcagagtgaattagtagcacaagccctgaaagcagatttggttccatacctcttaaaattactcgaaggcattggccttgaaaacctggacagcccagcagccactaaggctcagattgttaaagctctcaaggcaatgactcgaagtttgcagtatggagaacaggtgaatgaaatcctgtgccgttcttcagtctggagtgccttcaaagatcagaaacatgatttgttcatttctgagtcacaaacagcaggatacctcacaggacctggagttgctggctaccttaccgcaggtacatctacatcagtcatgtctaacctgccacctcctgtagaccatgaggcaggcgaccttggctatcagacttgaaatattcacgagagacaataaacgctgaaaggccagtgccaagtccacattcctccagctgatacgttgaagcaaactcttactgcctttctcctggtttcatgacagtgttattcctttttctataaatatatttttaggaaaaaaagtcagtgatcctaattgtatcacattataagaaagcactctgtggatcaacataagtgggtacacaagaattttttttttcttggtgtatgtaagcacatttgttcctttatatctgtttacaaaactgtgaatcaaaaagacaaaactttcttcctagtttttgtaattttttttttgaactagcatgactgtagggttgagctacagtcaacaaaaattgggctaagtcacttttccccaggaaagaatatttccctctcctgcatcaagtctgcgtggccatcctccccccaccatccaagactattaggttttgtccctgcacccttcactggcatcctcaatcattaaccttctgaaagctcacagtacacattagtatgtataactggctttaccaaattgaatgaaaaggagcttgtgcaaaaaaatttaaaaatggatgtcaagatgttatgtaaaagatgagtgtaattgtgaaatgttctatacactatcaaatatataaagctttctatattgaatgtacattatacagatcattcatatgtgtacataaaattttaaaaataaagggaattgactgctttgttaatgag

SEQ ID NO: 2431 - protein, 2213 aa, Homo sapiens
MNIIRENKDLACFYTTKHSWRGKYKRVFSVGTHAITTYNPNTLEVTNQWPYGDICSISPVGKGQGTEFNLTFRKGSGKKSETLKFSTEHRTELLTEALRYNCYKHHWSDSRKPVIVTPGGFDQINPATNRVLCSYDYRNIEGFVDLSDYQGGFCILYGGFSRLHLFASEQREEIIKSAIDHAGNYIGISLRIRKEPLEFEQYLNLRFGKYSTDESITSLAEFVVQKISPRHSEPVKRVLALTETCLVERDPATYNIATLKPLGEVFALVCDSENPQLFTIEFIKGQVRKYSSTERDSLLASLLDGVRASGNRDVCVKMTPTHKGQRWGLLSMPVDEEVESLHLRFLATPPNGNFADAVFRFNANISYSGVLHAVTQDGLFSENKEKLINNAITALLSQEGDVVNAELESQFQAVRRLVASKAGFLAFTQLPKFRERLGVKVVKALKRSNNGIIHAAVDMLCALMCPMHDDYDLRQEQLNKASLLSSKKFLENLLEKFNSHVDHGTGALVISSLLDFLTFALCAPYSETTEGQQFDMLLEMVNGRTLFKLFQHPSMAIIKGAGLVMKAIIEEGDKEIATKMQELALSEGALPRHLHTAMFTISSDQRMLTNRQLSRHLVGLWTADNATATNLLKRILPPGLLAYLESSDLVPEKDADRMHVRDNVKIAMDQYGKFNKVPEWQRLAGKAAKEVEKFAKEKVDLVLMHWRDRMGIAQKENINQKPVVLRKRRQRIKIEANWDLFYYRFGQDHARSNLIWNFKTREELKDTLESEMRAFNIDRELGSANVISWNHHEFEVKYECLAEEIKIGDYYLRLLLEEDENEESGSIKRSYEFFNELYHRFLLTPKVNMKCLCLQAIVYGRCHEEIGPFTDTRYIIGMLERCTDKLERDRLILFLNKLILNKKNVKDLMDSNGIRILVDLLTLAHLHVSRATVPLQVRILSNVIEAAPDMKRESEKEWYFGNADKERSGPYGFHEMQELWTKGMLNAKTRCWAQGMDGWRPLQSIPQLKWCLLASGQAVLNETDLATLILNMLITMCGYFPSRDQDNAIIRPLPKVKRLLSDSTCLPHIIQLLLTFDPILVEKVAILLYHIMQDNPQLPRLYLSGVFFFIMMYTGSNVLPVARFLKYTHTKQAFKSEERSILGHILPEAMVCYLENYEPEKFSEIFLGEFDTPEAIWSSEMRRLMIEKIAAHLADFTPRLQSNTRALYQYCPIPIINYPQLENELFCNIYYLKQLCDTLRFPDWPIKDPVKLLKDTLDAWKKEVEKKPPMMSIDDAYEVLNLPQGQGPHDESKIRKAYFRLAQKYHPDKNPEGRDMFEKVNKAYEFLCTKSAKIVDGPDPENIILILKTQSILFNRHKEDLQPYKYAGYPMLIRTITMSDDLLFSKESPLLPAATELAFHTVNCSALNAEELRRENGLEVLQEAFSRCVAVLTRASKPSDMSVQVCGYISKCVAAQFEECREKITEMPSIIKDLCRVLYFGKSIPRVAALGVECVSSFAVDFWLQTHLFQAGILWYLLGFLFNYDYTLEESGIQKSEETNQQEVANSLAKLSVHALSRLGGYLAEEQATPENPTIRKSLAGMLTPYVARKLAVASVTEILKMLNSNTESPYLIWNNSTRAELLEFLESQQENMIKKGDCDKTYGSEFVYSDHAKELIVGEIFVRVYNEVPTFQLEVPKAFAASLLDYIGSQAQYLHTFMAITHAAKVESEQHGDRLPRVEMALEALRNVIKYNPGSESECIGHFKLIFSLLRVHGAGQVQQLALEVVNIVTSNQDCVNNIAESMVLSSLLALLHSLPSSRQLVLETLYALTSSTKIIKEAMAKGALIYLLDMFCNSTHPQVRAQTAELFAKMTADKLIGPKVRITLMKFLPSVFMDAMRDNPEAAVHIFEGTHENPELIWNDNSRDKVSTTVREMMLEHFKNQQDNPEANWKLPEDFAVVFGEAEGELAVGGVFLRIFIAQPAWVLRKPREFLIALLEKLTELLEKNNPHGETLETLTMATVCLFSAQPQLADQVPPLGHLPKVIQAMNHRNNAIPKSAIRVIHALSENELCVRAMASLETIGPLMNGMKKRADTVGLACEAINRMFQKEQSELVAQALKADLVPYLLKLLEGIGLENLDSPAATKAQIVKALKAMTRSLQYGEQVNEILCRSSVWSAFKDQKHDLFISESQTAGYLTGPGVAGYLTAGTSTSVMSNLPPPVDHEAGDLGYQT

SEQ ID NO: 2432 - DNA, 111395 bp, Mus musculus
  misc_feature (1)...(111395): n = A, C, G or T/U
ttgggggttgatcctttggggtcaaatggccttttcacagaggttgcctaagacattagaaatcacagatatttacattacactttacaacagtggcaaaattacagtaatgaagtagcagcgaaaataattttatggttggggggttaccacaacatgaggaactgtatcaaagggtctcagctatggggaggttgagaaccactgtaagtcttagaacgtcttctaaagaaggtcttgggaaagagaggtggagcaaagagctggtccagttagtgtcagaggtgggtggacctctgagggagtctctgagaggaaactagctttgtttcagatgcattcatcctcagggagcccagggttgagatgggcaggaactggccatggggattctgatgtggatgtagacctgctggatgcaggagctcatgtcctgtagcatgtgtatgtgtgtgtgtgagggtgtatatgtacatgagggtgtgtatgtgtgtgagtgtgtgtatgtaaggatatgtgtgtgtgtgtgagggtgtgtatgtgtgtgaatgtgtgtaatgtgagggtgtatatgtgtgtgagtgtgtgtatgtaagggtgtgtatgtgtgtgaatgtgagtgtgtgtatgtgtgtgagtgtgtgtatgtgtgtgaatgtgagtgtgtgtatgtgtgtgagtgtgtgtatgtgagggtgtgtgtgtgtgtgtatgtgagagagagtgtgtgtgtgtgttgggatgagatgagaatacttgattttcctgtgtctagtgtatgcttagagtgaggacagtggtgcagctcagtttgtagtgtttgcccaacaagcataaagcctgggttccatccctagcaccataaaaaccagatgtgccttggaagaccaacaatcccagcaccgcagaggtgaatacaggaaaagttcaaggtttccctcctctacagtggtacatgtattcaatcctagaatttaggaggcaaagacaggtgactttgcctgtgactttgaggccagcctggtctacatagcaagtttcaggacacccagggctacatactgagaccttgtttcaaaacaaacaaacaaacaaacaattaagactaaagggaatgtagtgcaaatgagagcttgaagaagtgctgactgtgagtccctgggccctgcctctatgataattattccccacaaccctgctgtgggtcctgaggctgcacactcctggaactccagcctccttagagagattcaggctcaggaagggctaggattcttagagcagccttgggaatggtcaggggtgagcctgtatggaattagcattaataaagatggggaagacaattcaattgctcacggcctttctgcttacagcagatggagcccgtcctttgcccagagttacttggaattctttttttgttacttggaattcctagtctgcactgtcagctttttgccttcccggaaagctggtgctcacaccaggcctcccagctggaggggttagcaatacagaaatagtaacggtaacccagatgttgctgcctaactgacacctgctcccacccagcccagatcctggggcagccagggcagtgtctcctcagacaacctcaatgtccaagggtagtgtcagccttcactgtctggtgataccatgcttaaactcactactacaggtcaggacactgagggccaggaagcaagtgcattgggttcggggtctggtttgagcagcagactggcaaaggttagacttggatatcacaagctgaagacataatagtttcaacagtcttgactctgttgtatctctagaacctaactcaaaacatcagtcaagtttaactgactgaaaccacccatcttggcagacactagggcatctttgccatgaaggtcttataatctttcgtcttgccccggggtttggttttgctctcagggacttcaatcctttgcctcattctccccttccattctgggaggacagaagctttcctgacagttctggggagcttcctaagaagtcaggaaaggggctggtgagatggctcagtgggtaagagcacccgactgctcttccgaaggttcagagttcaaatcccagcaaccacatggtggctcacaaccatctgtaacaagatctgacgccctcttctggtgtgtctgaagacagctacagtgtacttacatataataataaataaatcttaaaaaagaaaagtcagtaaagatgacagggcaacccaaccaccctgattgggacgcagatgtcactcagtgaaagaaatggctttatcttacagtaggaggtcccatgtagcaaagggttagtcccagtaatgtccttgggtttgtattaggaaagaataggggagatgaaccgggagggaccctcttgatggacttccctgaatacaggcagaacagtatggtagagaggctgtctctttcccctacaatgagacacgtctgaccctctgttgtcttactggtaaccagaggatgccgtgaggatgtgacttctcactggggcctgctctcccccacccggggaacgaaggtgggtgaagggcagttcatagagattctgggggagagaactcaagctggagcttcaggctgggagtttcctgtagtttatcagtaacaatttgtatgtctgtctttctcttacaaacacagctcctgaaggacggctcccgtgggcctctctggcctagcactgaggagtagaagaacaggcattggaaaagaatgaacgtggtgtacgtcatggagacaggcggatccagcccggagacccgcagggggcggggcgcagaggggccagcagagcagcatgttttgactgagccgcttacaacttgcagaaaccacggtttcattattttttttcttgtcacaacaagccttcgaacgtgtgtaactctactagcgatggggcttaattagctgtcttgggagcgatatgcaggggcggtggggttacgctagtggcaaatatttctgatgatttgttttttgttttttgtttttttttttttcaaactgcctctttataatgccagtaaagatttacgcgctgcagccggaaaggttctacacgggcagagcatccggggaactctatactttccaggtttggtctttttcctcttgtttcaggaaccgtggccagctgaagactatagtatgaaactgagtttgtttaggccagcagggggtgaggggagtagggaccgtggacttgggcaggacaggataaggtctctttgcagactcctgcctacctggtgagtgcctgattccctgtctatgggtgatgccagcctggagggcaatcttctctagacttccctctctccctttcagttctatttctgtctctcctacccaggggagtattgggggctggagttgcatctcactaggaagtatgacaaacagtggggatggaggcagaaagggggttaaagtcctggcgataaccctgagttctcccagtctctctgaaacagcccaaagtgtctatggcatcccaacatccaaaaatgtcttcagccattctttctttttgtatgcatgtttttttctttttccatttttttttaaagatttatttatttattatatgtaagtacactgtagctgtcttcagacgcaccagaagagggcatcagatctctgttacaggtggttgtgagccaccatgtggttgctgggatttgaactccggacctttggaagagcaatcgggtgctcttacccttgagccatctcaccagccctctttttccattttaaattatttttttatatatatttcttacatgtatgagggcttgaatatgtctagacatcacattcatgcaatgccagaggatgccagaagagggcgtcagatcccctaggcttggagttaatcctttttaattttatttatctttttatttattattagatattttctttatatacatttcaaatgctatcccgaaagttccctatacctccctccgccctgctcccctacccacccactcccacttcttggccctgctcccctactcacccactcccacttcttggccctggtgttcccctctactggggcatataaagtttgcaataccaagaggcctctcttcccagtgatggctgattaggccatcttctgctacatatgcagctagagacatgagctctgggggtactggttagttcatattgttgttccacctatagggttgcagaccccttcagctccttgggtgctttctctagcttctccattggggggccctgtgttccatcctatagatgactgtgagcatccacttctgtatttgccaggcactggcatagcctcatacgagacagctataacagggtcccttcagcaaaatctttctggcattgtgcaatagtgtctgggtttggtttgattataggatggatccccaggtggggtggtctctggatagtccatcctttcgtcttagctccaaattttgtctctgttactcctttcatgggtattttgttccctattctaaagaggaatgaagtatccacccattggtcttccctcttcttgattttcttgtgttttgcaaattgtatcttaggtgttctatatttctgggctaaaatccccttatcagtgagtgcatatctaatgacttcttttgtgattgggttacctcactaaggatgatatcctccaggtacatccatttgtccaagaatttcataaatctatggtttttaattgctgagtagtactccattgtgtaaacgtaccacattttctgtatccattcttctgttgagggacatctgggttctttccagcttctggctattataaatgaggctgctatgaacatagtggagcaggtgttcttattaccagttggaacttcttctgggtatatgcccaggagaggtattgctggatcttttggtagtattatgtacaattttctgaggaacctccagactgacttccagagtggttgtacaagcttgcaatcccaccagcagtggaggagtgttcctctttctccacatcctcagatgctggcagatgcatgtgtgcatgtgtgcatgtggaaggggggggcactgaccacacactgattcctgtgcgcacgtggaaggctgaggttgacattaggtgttgttctcaattgttctctaccttgtttttgtttttgttttgagacaagatctctcactgtacctggaatcgcttggctatttggccatagaaccccatgaagtcttatttatgggactaccggtacaccacatgcccaggtttttacacgctggagatccacgctcagattctcatgcctgtgtgaccatgccaccttctcagccctgtctccttttcttgcctgcaaagtgtcttctttaccctggtatactttttcttttcttttttaatgtgctgggtgaccacaggcctgtgcacctgatcatatgtgcctgatgcctgcaggggccagaagacagtgtcagatctcctggaaatgaaattatgggtaaatttgaactatcatgtgggtgctggaaattaaacttggatcactccggaacagtggatctcaatctttttcatgctgagtccccttaataccgttcctcatgctgtggtgacccctaaccataaaatcatgtcactgctacttcataagtgtaattttgctaccgttatgaatctcaatgtaaatatttttggagatgacggtttcccagcggggtgccgacccacaggttgagaaatgctgctctggaagaacagccggtgctcgtactgctgaaccatctcttcagcaaagttgttgtatcgctcaggcaggctttcaatttttccttcccctgtcttaacctccacccgtaagatccaggaccacgggcatgaaccataactcctgcctttcctcaactccttagcaaatgtctcagtgtacaggccaaagaagcaaacccatgcatgtccacccacccattccctttgggtgtgataagaagatacagtcagctagggagctttggggccctggaaaactcctgtagagtctttgagtccacgctgtccctggagggactgcagctcaacctccagggaaaagctaccagatgcaccacacagttgttttacagtcaaagtgaagtgtcttgagtggagacggttcactggccgccactccgtgaagagacactgaatggagcctgtcttttccctggtcctcatcagatcagcagcctaacaatgataattttggagtgaaggtcaaccagctctaccagccctctttgtcgtggtagaactcctagcaagtgcaggtaggaaaatgctgagagcattccggagaaccaagagcaggggtcagtccctaagagcaagccagtgagatacgattgttccatctgttccatcgagaagtctagccgaatcaagagccctcggccaccaggggttagtactgccccatggtcagtagctgcccttgggatgaaggacgggggtggaagtggacaggaaagatgtgttccaggaaatggccctcagagggaagggaattgtttgactttgagagaggaagggcattactaacctatacttccaggtcctcctgggtccactgtgcatgccctttttcaccatggtagcaaagaccctagaggtctatttgcagccaagaatctaccctgaggagaacagctccccaatcttactggctggatagggctaattactcccccaggaactagggacatgttgacttgaatctgtggaaagccacaacttctgtgatttctacagaaacaaaccaaacaaacaaataaacaaacaaaagctgtgttttccgccttctagctggtccaacccacgtgttgtagaagaccatcctctgagcacaatagcgatgaccatcttcaacagaaacaggtgtgactgttcaccagagcccctcaagatcgtgcctgttgacattccttcacggtagcaagggccaggaccctcacctgagatcccaggcaatcccttttgcaccccctcgtctgctgtttgcaattctgttctaattgtgtgtggcttgtggtcttgggaggtgtgtaaatgtatagaggatggaaggttatctgtagatggggacaagggagactccatctatgcgtttgtgggaaagttgtcattcatgttgggtgtgacactttccagtgagatgggtgctttggagtcatgcatgctctgtaggtgagtccaataacctcattggtttgccagcttggatcttggtggaattactttgtctggttttagtgccctatcaggaatgcattttatctccccaggtagaggtcccaagatgtcccactagctggtgtttgtgaagctaaaacagtctagtatgggacagtctgaccagccatgttgcctatgtgtcacaaatccccaagagagcaaatggcagcattatctgtgtgtgctggactctcattcttgtgtgtcaccccccaccagtgacttcaccctcagagcctccttattacaagccctgttactatcctaactttgcacatgaggaactaggggcttggtgattccaaggtcccactgggagtagccgatctgagatactgactcacatggtgcctgttcataaatagtcaccagaaacgaaacaaaaactctcttcagcacagcaagggcaccacagggaaggctctcctccctcagttccagacaggctcaggagtttaaccagaagcatagcagacatgtaagaaaacaacaggaagttgggagactctgaattccttctcatttttacctgccccattacagagtttggggaaaagcagctttggatgtttggtggaagagctgaagtccatttcctgtacagacagctctggtctgtccatgttcacctggaccatcccaagtcaggttggaactcttttgtttttgttgttcaaggcagggtttctctgtgtagccttggctgccatggaacccactccgtagaccaggctggccttgaactcagagatctacctgcctctgcctcccaagtaatgggattaaagacaaaagccaccactaccacaacatgagaggttagaacttctgatatttaatacattcttcagtattaagagaatgatatagatttctgaaatgcagtcaagttacttaagccctcctacatagccatgatttagagccacagatggtttagaatatagtctgggttttacagtcattctttctcaggagaacatctgaggcccttataaggagacaggggctttgctgcctgtccctaccaggccagcctcccacttaggctactcaaaggaaggtcctttctaacagttcccttggacagaaagtgacactggccccacgtagtaccagacactactatgttgctttggttgtcttgcctttctttcctcccttcaaatgaggacgagaaagtttactaaggtctcaggctaatgagggaaatttacaaccctctggacagtccccgagggccacagcagaaggccaccaataacttctcttctctggccccaatttcacctgactctgtacaccctctctcccttgggtgcttcccgagactctgggtctatgggactcagcctcagtatgaatcccagacgatgctcactactatttggttttccccacagcaatatccagcccctgacggtctggccccaacatctcaatcactttacacctctgaacagactcccattcatctgcatcctgcaagtctctcacagagcctgttctatgctttacctaccaggacagcctcctgctatatctcacaatagcttgccccagaacatgctatatagataagcctgaagtctcacagagatctgcctgcctctgctcccacgcgctcggaagaaaggtgtgtaccacgatgtatggtccttatggatagaaagtgccagatttcaggccgtggacagcgctatgccaccttgtggcattttcccctgccttttctttttgtctatttctctttttcctttccctctctccctctttcttctctctccctttttaaaaatcatgtcatttgtttgtttgtttgtttgtttgtttaaggcagcatttctcagtgtagtttggttctcctggaactttctctcagagcgggatggcctcgaactcagagatcctcctgcttctgcctctcaaatcctgggattaaaggcgtgtgccattaagtccggctgcaataaaagttcttaactgctaattcatctctctagactatactttaacggaagacatttttatttgtgtatgtgtatagctgacggaatgggaggatgtggagagcagaagacaacgtggaagtcggttctttcctttcaccatgtgggctcctaactcacagcatcaaacttggagcaagcatctttacctattggtcccttttgctggcccggttttttttcttttaaaatggtttggtgtaggctggcctcgaactcactacgtaactaaggatgaccttgattttcctgcctcaatctcctattgactggcattacagacgtaggccaccactcaaggctcttagtcgcttctaaggtctagtgaacctccaaagtggtccagcagattgcagccagccacccgaggccgccggccttcattcaacacccgccggccgcgttggctgcggagggcgcatgcgcgggttccggaggccttttcccggcgaccccgaggctggtgcgtggacacgagtcttcgcgggctggcgtgagcgcgcgcggggaggggggggggcgtgtgcannnnnnnnnnnnnnnnnnnnnnnnnnnnnnnnnnnnnnnnnnnnnnnnnnnnnnnnnnnnnnnnnnnnnnnnnnnnnnnnnnnnnnnnnnnnnnnnnnnnnnnnnnnnnnnnnnncgcccgcctgcccaccatgggcaacgaggccagcctggaggccggcgcgggcgaagggtccgctgccgcccggaggctctggtctgggtccgggccccggagcagggaagccgccttcagcactagctggcggcggacagctccccgtggctggcgctgcgcgagcggcgggacccccgacccctggtctcggtccggtccccggccctggccccggccccggcccgggcaggtaagagcgcgcgtctgggctcctggggggcagggagctgtggtccgaatctggggccggggcctggaatcccacgatctagtggacagcaggttcgggtctgcctgcactgcgaatcctgccagattggcgtgagctgggtggtcaaggtgggcaaccctaggttctccagccgccccgccttgacaggacaggatggtgagtacagggttagtcagggcctgcagaccgtgacttcgtcacaatcccccaattctcttccccatagcgcaggggcccaacagctcaggaggggcttatgtaaccttagtctggtccctctgcacaggggagcaatgggatggaagacatcctccctgtctgccagcgtctgcatatgtccattgtgttgggtcgagaaagagcacaatgggagtggctgtcagggaagataagtgtcactgctaggaatagggaaagatgggaatagttgagccatgaacttggtcctttgctttcctcaagcatttcgtgcctgtcactgtctctgaggaaaggaaaattgcccaccggatactatcaggccctataatactcgcggtcatgtgctttcgtcaagggtttgtgaacactttcaggtgaggcagaaaacgctattgaattacctcccaccagatatgaactcatggcttaatgatttagctcaacacctccggccagtgggaaagccaaaatccacatagactggtttaaaccaaatagatctggccaaatatttttgagcccagcttgtttcagggtttgccaaacccagattctgcaaaaacaagtggcatggaaggcggaggatgtgaatgttggcctgtgtcagccgactcaagactaccaagagatgacagggtaaaacggaaggcgttatttttacaccagttgggcctggggagtatcgtcccccttggggggaggtgtttctatctccattcaaagctgccaatatctatgttgctttgccttttctggtacacagaaactccaaggaagaataatgtttgctttttcagacacccaactgtgcctcctgtgttgatttcttcaggagtcttttcttagataactcacagtgatgcagagatgtcagtagcctgaagccatctcaaacaggccagcccatgaatgtagcttttagaggaggaactggcccgttttacatttgctttgacagtaatgcagttgagtaccacgcagctcttagccctggacacactgcccatctcgctgtgtgatgagatgcttgttttgggttttagcctgagaaacaggctcgccaagcttcagctctctcccttcaaggaaaagctacagctgaatggaaaaccaccttgttgttatatggagaatttaccatctcccttccggataaccagactggctgctctactagttgtttatccgacattgcagaggcaagcatatggaattttggaaagacctggcggattagagggacaggacagaggctgctgctgtatactgctcatacggctcagtgttccatttgtgctctacctataagtcctgcttcagggaaaacctagccactgccatcatgcagaaaccatgggctattgctggattttgcagtcacaacacattttgccagctgtgggtagggctcacacactggcctgtgtgtgtgttcctgaggtccttcagttttgaggctcaggggctgagctgatttgtcagtaacactgaagactgaggacccttgaggtcctcttctagctcctagtcagtttatcactgcacctcagctaagcagtcagccacttctgtctgtctgtctctgcctcagagtcgggatggcttctaggtcctttcaccagtgcatctcaggtacctgataccaaatttagcatgttctgttctgagatgctgatgaacagattggcccattgatggagaaaaagccccatggcatgagccccaggcattcagcaaagagcattgcacagggatatatttgtttccaacaaggccttgaattttatagcagccagaaaccttatagtataggggaaggggccaaaagaaggtgtgatgaattttctaaccccataggggaagagaagtgaggttcttagggagtggaatcctgcttctctccgattgccacagcacctcctgtcacctcaagctgagttcgttcttttcatcctcctgctgagctgactcgggctctgtgagggggcggcttcagcgttcaaggctgaagagcctgacttgaattcagtaagcataggtgctgccacacccatagtgatgctgtctctgggcctccagggacgatggcagagccttgggcactgcatagcttcacaaggaaggattttctgtgtctggtctcaggttcacctcatatagttctatcagctctgcttttcctaaggagacagattggaaggaagctgatctctgtctcagactctgctttctaagctaagtgacttggtaggggctgcatcctgtcagaggaaggaacaagcttcattcattcattcattcactcattcactcactcactcactcactcagtcatttatagtgatgtatcaatgtgcagcaagggcatagatgatgcaattttacctgtgcatgtatccatgacataccaccaggttaaggccagaccttgtaagaacctgagaaagtaaggagctgggaggtagtactgtggcagagtgcttagtcagcacctataaggccctgagttcaagtcccagtaccaccacaaaacagaacaaaaacctgctcattgagtactggagagatggttcaacagttaagagcactgactactcttttagaggacctggagtcaatccctgacatccacatgttgggtggcagccatccataaccttcagttccaggggatctgacacttgcttctggcctctatggacaccaggcatacatataatgcatagacatacatgcaaaacactcatacacataaaaatacaacttaaaaatccttacacgaagcagggagggagagatggttccgtggtgaagagagcttgctacacaatcatgaggacctgagcttcaaataactgggcatctcatgaaaacctgcatcccccagtgctgagcaggcaggatgagaggatcagtgagacttgctggcttccagccgctctgagaagagagccccagcttcaaagggggcgagtggagaatgttgaagaggaccctcgagaccttcctttggcatctccctgtatggacacaggtgaacacaccccctcccccaactgtgtacgtagatttaggcacattcacacacacaaataaattttaagcaactgctttaaaattgcacaaagggcccacataaatccgtggcagcccacacatctcgcccacatcatctcgcccacatcagctgaaagaacgtgtaaatgttttgtcatgtgcaaattgatcttcaataaattagctgaggtatcttagctactgagaacaagtactggatttggctacatggacagtatggaagaaaacccattaggtccctacccactagcactcagtctggttggttaggtccctcttgaagagtcacatcgtggataatctcaaggaaagactgggcagcctagtgtctacatatggaagggttttcaagtaggaagattagaaagacacatttaggtttcaagggagagagacacacaaaacattatgggaaaatcactggaattcaggggtaggggcgggaagaggaatgtggtctaccttggcagagacagtgagcaaagagactgaatgcaagagactcggagagagacagggacaagccagctgagacatctctctctaaatgcccatcaaaagccacagttcccttttagttcatacgacatggagaagtcttgaggcaaacatgacaggaacccttatcatttgctggaaggtgagagtgcccacgaaccacgtggagttcttttctcaaaacggattcatcaggcacagtgtctgaatccaggtcccccgcattagctgatagccgtggactagcagtctacagtgaacctgtgaaggcagagcgataggtggaattgccagatttggaaataaccgtcatttgtcatttagaagccttgtctggccccagtggctgagttttctgggagtacaggtatgaattgaagtgaccttcctttagaatagtgacattgtcaatcttacctggagagggcagctttgtgacattgtccccagcaccagtggggctgtcaggatgctgtcagtggcttgctttttttttttttttttctattttggagacagagtcttattttgcagcctagctagcctggaattcaccacatacataacccagggtggacttggactagggctgccccacctgcctctgctttacaagagctgggacgacaggtgtgagtgaccaagcctggctctgagttaaaaattcttttttctagtggagatattaggagaagacaggctatttaaacaagcaagcaagtgagcaaacaaacaaacaaacaaacaaaacacgatgactatggaacacttcagcatatgtaacaacagagaggattgtccactaaagcctcatgttccaattacgtggatacaggcacgctcaactcagccaatcacgtttcctttacctcccttctcactgagacaaattccaacagtcctacatcccatcagcagcatctcactgtatccttccaagaaatgagctctgaataaacgtaaccatgacgacaccatcatagctgagtaggtatttctttcctcccagggaaggtatgctaggaatcaaacccagggcctcagaaatgctggccaggcaccctgtcttcagctaaacatacagcctgttctttaaaaaaaaaagatttatttttaattatgtgcatttgtgtgtctctgtgcgtgaatatgcatctgagtgcaagtgaccgaagaggccagaaagactggctctctctcaagctgggtataggtagtaggagccactcaacatgggagacgagaactgaacctgggtcccctgcaagcacagtacacgacgttaactgctgagctgtctctccagccctccaacaatctctccttaatctcagggatcatttggatgtgggtctgtcttctgatcgtgttatagattttggcagttggtttgcacaaattgtgatatataaggtaaatctagtccctttaaattgatagactgtctctgaagttgttcgttctgtaatttatgtattacatctctgagtcatttgttctttgatccttcatattctagactgagctaattgcattcttatgatgtcatttaagatgtatcttggctaaagttttcctgaaaaattggatattataatattatatttagactctattctaatccatgctttattattattattattattattattattaattcatagtgctggatttcaaaccctgaagcgtcatacatgctagacaaatgccctaccactgaattgtatgtcacaagcccagacttcattcattttgttatttttgagaccatgacttgctatgttgatcttaaacatacttagcccagggtggcctcaaactctcaatcctcctgccttagcctccaaagtgcagagcggcatgtgctaccacgccgggctgaaattctaccgttagaagaagggatttgttgaaggattcagatatggagagaggaggaagtcgctaaaaatagagccaggctttggactaatttgggagccaaagaacaatgtactgggtcactttttcttctgtctctgaaattttcctgatttgggttggcactgagtttaagaagccaacgctttcagagtcctgccctttgaccccagctcacgtgagccctctgtatatccgaaataagaagctgctaggagctaggtttgaggggttcaagcaatcctcagctcactggtctcgctccgggagcccatggtctgtcctgttgagctggggctgatcgtgccgtcacattgggtctcaccgtggttactgagtggctgcttcatcgccgacagtcggctaggttttttatttctctcttgccctgccatgccgtgcaaaccctgcaggccccatctgtcctggcatctttgtccttcctgccccggaactgtttgaaaactacaacggcgaccgaggcctgcatgcttgcagcagtggctgagggccacttcgggatatgagtgaggcttgatgaacaagtctagctgtggggcctccggcctcagtcctcccgttgccagaagcatgtcatgtcggtagcagcaccaaactcagggacttgcccaagttctgctcctaagggaccatctgccatcttcgcgtagaagcaccatggggcggttggctatagttgggaccgtggcctgtggctccctgtggtagggaagctggaattctggcgctctgccctctgtggttccctcctgtcaggccggacctttagtgggtgggtgtctgctggtttttctgtcttgtgtgtgtgtgtgtgtgtgtgtgtgtgtgtgtgtggttctgggagttaaacccaaggctgtgtgcatgccagcctaggcaagtgatgcttgaccactatcctcagctcattcccgcggcattattctccctatctcacttctacttaggactgagcggctgaggccattgcgcatgctccttcgctcatccgaattgcattctggggcccagcagggtgttaggatgtttccttcccagctttgcttttatgcacccacggttctaatgagagctctgatcaagaagaggctttacctgctgactgactctcacttctttctaacaagaaaattacttagaggcaccctagaaccttttaagtccttttcaggctcaagtccagaagtgcctgcagaagcctggcccagagcaggtggttctgatgtcagagccaagggtgaagactctgcaaggaagtgggagtggtttctgagacccagtctcacatacagaggggatcaaagggctctaacggcttgtctaggagctcctgagaagtctgtcctacccgcgagtgacgctggcctagggaggaaacaactctcacaaggatgctgaataattactgcagaaatgtgggtgatttggaaaagagggaagataaggacactcttcagtagtcacattggtgtattgctgtgtatgtgggggttagcaagggactacctgtatgtgtgcctgtgcatgtgcctgtgtgtgtgtgtgtgtgtgtgtgtgtgtgtgtgtgtgtgtgtgtgtgagagagagagagagagagagagagagagagacagagacagagacaggcagacagggatagacagacagaaaacagagacagcgggaagagagagagcattgggtggtacatatttagaaaagaggaaagccacagatgttagaccttacctaccactttgaggcaaggtctctccctctctttaaatttcttaaaattattttattttatgcatatgggtgcttgcttgcatgtgagtctatgcaacatgtgtatgtctggtgccactaagaccagaaaggacattgggtcccttgggactggagttatagatggttgtgagctgccatgtgggttttgggaattggaccctggtcctctggaagagcagccagtgctcttaaccactgagcagtcatggtagtcctacatacccttttatcttatctttttgagacggggtctctgtatagcccggggagtcttagaaactttctgtgtagaccaggttggccttgaactcagatctgcctgcctctgcctcctgagtcctggtaataaaggtttgcgccattatatccagctctcttgacctttttaaaaatactttggttttacttatgtgtatgcatgtgtctgtatgaggatttgtgaatgtcagcgcctgaggaggcaggaggcatggacacccccggagctgcagttatacaagttgtaagctgctgcccaacatggatgctaaaaatcaaactctgctcctctggaaaaacaggaagtagcctggaccattcctgtccatggccatctaagtcgggtcagcccccttctcgttgtaggaccaccacaattacagacacctaccaccacatctggcgttttgtttgttcttgggcttcaaatggaggtcatgtttctgtggcaagcactttactccctgagcctaaaggtttttggagggtggggtgggagcgaggtcccatgtggcccacactggccttgaacttgtgaccctcccctttgcttcctcctcctctaggtatgtgccattataccaggcttttaacagtatttattatataccacgtgatgctttaaaacatagaaaaatagtgtgtttagtcactcacatacttattttcttgtggtgaaaaagagttgaaatctgctcagtgctttttcaagagtataatgttgttattaatttatttttcctgtctaacttagagttgtttatctcttggccaaagtctctgcactctcctcttctgtatattttatatgtgggaacccttgggtttttttttttcttcagtgaaatagaaatggtttttttaacttaaaacttattacttacatattttgatgctggtaattgaacccagggcttcatatatcccaggcaaatgctctgctgctgagctacatcctcagtccacaaggaaatgttttcttgtttgagacaggatctcaggtagctcagggtgacctcaagctccccttgtagctgaggataattttggagttgtgatcttccacctctacccccagagtgctaggaccccatgcatgcaccaccatgccattctatgcagtgctgagaatcgaacccacggcttcaagcacaccgggtggatgctctacatctgggctacatgtccacctcagcgttgtttcgtttgtcagtgtctcactgtgtagcccagactcggttttagtcttcctgcctaagccttctgagtggtgggatcatgagcacctcgcctagagtagggttttaaaggaaccactcgagcctatgcttggtgagccgtgagaacagaagaaatagcatagaatgagtgcgctccgccctccatggacttgtggtctgaggagggacagacagacatgtccagatctctaccctctctttcctcttccttcttgtccttctcacctctgcttctctttgtctcacggaggtaggataatcaaaagcacgatttgaagggattgtattattccatatcctaaaatagtagaacatatatttgtatagtgctttacagcttacaaaacacattcaaaacattagcttattctgttgggagctccaaagacctaagatgagcgtttcagaacagctagcaagcagacgttagcaaaccaaaatgccttacactgagcacagctggagagccgtgtcatttcccttcctcctgctcagagaagatggaaaatttagcaagaggatggggagggctgtggggaggcaaaaggatcaggaagtaggacatttggataaaggacagtgtggggtgcggaagagtgggcctcctgaatgccgatcagaaagccaggttttgatcatttgatgttgccccagacgccacactgagtacacacaccgaggagatctttaggatattcttggtttatttttgagcttctgaggctcatgcttggtaagggctccgccactgacccactcccaggcccttaagttttcagtttcatcatccctaaaatgaagggtttaccggataatttccaaagccccattcacccttgacatttgacctctatgagatgaataaaaagggaggggatgatttccattgttcttcagccccactgagaagtcaaggtcacaaactggccatggggctcacacctgtaatcccagcatccaggaggctgaggtaggagggtcacgctgccttccgggccagcatgtgtttgttaaatagtatatcagcctgagatacagaatgagaacctgtctcaggcaaaacaagatgataaataaaaagcacaatgtgtttccatcaggggaattaaaagcagctgtaaatagagggtggctcatttactatgttctagaaacttcctagaatggacaaaggaagtcaagcctggagccaggtcgatggcactttccctacaggtggctgcttggaaagtcactggcctccatgcactggggtagccagcgatgcaagcgaaacctaggccagcagagcctgctgtgggctcaccgttccctgctctgggccccctcaccttctgagcatctctctccccataggcaatggtctatgtgcctatgattgccagagggagctggagttgggcaaaactgtgaggggggaggttggcacaagggaaggcgagcccagaagaggctagtttggtctactgcactcatgcagttggacggtggagttgacaccttcattttagcgggaagagctgccctaggcctctgtgggcttaggccagactctctcagtgtcaaggtcagtacgtgagggtggtcctttgagaatatggcttggcttcagcagataatgtgtgtctgcccctagcccagccctaacagatgctagaatggctgctgttatctcccgggcagagctctgccctcgtatgaacgcgaaagtagtcagcagtctttggtctttctcagcagactcctctgttaggaaactcctgtttctggttacttgaagtggatttccttatatttcttgttggctggtcctcggctcagaggtttcacaggtatctgttatgagcctccctacctgccatgttctcacaattcctcagtctggtcttctctgactttgagactttcagctcctttggctgtcgtggggacagttgcctacctaggctggtgtgcccaaggctcagtactctaaagacagggagactcggagaccagggccctggcttagcacgtgacatggcttatgaatgacagtctgaagatcagagccttcactcatgccagcagcagaaaatcttcctctgcctttctgagatcttcatggaagctatccccatggctgtctagcctcttgcaggccatctctgcacgaaggctgagtgactcccatttggaaacgtggagcccaggtgtgcatctgcgggagcctgtgtaggtcctgccatgtctgctctctgtatgcctggagattctttgcaacctagtgaggtttttggatcctatgttccactggagaacgagggtaagaattaaggcagtgtttgtttcaggagtcatcctctgagggcatatccctctcctgcgtccttgtgagcccacattctcgagccccacatctgaccttgagtggccagtgttagagtttcacagccaaggccttgctagctgatgtttggtgagttgccagctgaggagagagggagagtcaaagtcggattggagaggccagcgcccctttaccctggccacagccccctgtgcattgcagaggaatcactgtgcagccctgctctttccctgctggcctttccttaggtagcccagtctctgggtctgcaggggctgcactcacaagagcagcaggtgctcagcagacacaccgaaggagaaatgtggaatggtgaggggctggagagatggctcattggaaaagggctcactgccagatgtgagaactgagtctcatcctcagaacctactcctgatcctcctccctctgccagtcagtcctggacctacaagtgtgtttgcatgcccacacgcatacccagcgtatcccttctcttaaactaaaccaaaaagcccctcactcctgtacagtcttgagacattgtcattactatgtgttggctttattctaacacatatgtatgcgtgaatataggtagagtgtagaatgtgtgcacatgtgtatagttatttttttataattataggcatattctagtcacattgtgtcaataggagtgtgacatttactgtggctggaattttttaatatttttattaggtattttcctcatttacatttccaatgctatcccaaaagtcccccataccctctccccccactcccctccccctcactcccactttttggccctggtgttcccctgtactggggcatataaagtttgcaagtccaatggacctctctttccagtgatggccaactaggccattttttgatacatatgtagctagagtcaagagctccggggtactggttagttcataatgttgttccacctatatggttgcagttccctttagctccttggatactttctctagctcctccattgggggccctgtgatccatctaatagctgactgtgagcatccacttatgtgtttgctaggccccggcgtagtctcacaagaaacagctacatcagggtcctttcagcaaaatcttgctagtgtatgcaatggtgtcagtgtttggaggctgattatgggatggatcccgtgtatggttattttaaagtaataatgtagctatttttttccctagcaataatactagtgaatataagttaagatcccctggggtatatttggtctttaggttatatctttccagagacatataggctcatgtcttgagctattagaagttagtctttcctgtgtggttatgccattaataagataaaaagttaagctcctttattctagattgtttttaatttgtaaggattggttttgagtacttatctgatttcaccatattactgtgcaataaatcagccaaaattcagtggcttcaaataacagttctttaaaaaaaaatgttctcactcagacatttgcaagctggatagaattcactgatgtaggctggactccaggctccacttagtgtgtgcttcatcctccctgggcagcaggctagctgctggttcttgcaataaagatgacagacacacgagtgtgtttgaactgcacaggcctctgacttactcattgtggtggtctgattgagagtggtccctataggctagtattattggaacacttagtcaccactgaatggttctgtttgaaaggattagaaggattaggaggtgtggcctttttggatgaaatgtgccattgggggttggttttgaggctttaaaagcccgtgccaagcccagtgtctccctctgtggatcaggacatagctctgagccactgctacagtgctatgtgtccgctatggtctccaccagggtggcagtggacaaagcctctgaaacttcaagcaagcccccaatcagatgctttctattataagagattgttggtcatggtgtctcctcacagcaatagaaccgtgactgacactcatgtgttgttcatttcctttagacaacacaattcgtggttaagcccagtgtgatattgtagtcaccatacatcccagaacttggtgatggcaaacaagcattttggtcaaggtctatactgcagggatccagaaagggcacactgggagtggctcatttctgctccttcttcccttccttctgtgataagaaacagtttcatcagcattccctgtccccacctcacttccctttttggagacagagtctcaatatgtagccttggctggccttgaactcactgtgtagaactagagattcacctgcctctgcttcctgtatgcaagggttaaagtcctgggattaaaggcagaggctactgcacttgacttacataatgaatcttgatgatcatcactttgtagctgattcagaactcctaccttctctttacatctgcactctggtccccttgtgaacataacataatttctccatggacattgggctgcagcatcacagtgagggacccaacatcgaactcctaaacttaggccctgtcccttccattcatggaataatggccaataacaggaacacacatgctagtttgtgtttccatcagtgtgggatttcctcaagtggattgcttgaaacaaaatggcaaatgcataagtcagtgttgaagacaaaagtagaaccagagagctggccagttgtcgtggctagttaccagtcagaggcggtggccagttgtcgtggctagttaccagtcagaggtggtccatacagcagggatggaggtgacatgcagagccggaggaggtgaatgtggtcacagtaatcatcttctcaacgtgctctgcaggtgcagcaggtgtttgctcagagttggctgcagagagctgggaaagagaataatccagagaacccttgagctccgcctgaacgtctggtgttgtatgtggagaggagtgggcagagcctaagtttaggagttccatgttgggttattgtgcttggctttcccctggtgcttgagagcaaacccagggaggtgctctggaatccaagggcccgcccccccccccccccccccgggccaggctgtgattggcaggcatccaagtgaggtgacagccatgttgggtagtcagatccaggcgacaccgttaggcagcacttcacctgcgagtgctttcctgtaatgccacctggttctggaagagagacataatggtggaagtaaggcagcactggcgttccaggagagcgagtcgagtacgttcaattgaacaaacattagtcttatcaaatgatttgttggaaacgaaagcactcagcacgaggcctggcatgacatgactattaattgaggccaggtttcatggacaggcccaggaacgaaaggtgaatgagacagactcctgatttcctattttagcgaatgtttgagttaaacttgattaagggtctgttccctggcctctgggggctcttaggcagcgggtgatgcctgacgggctcagagggccatggaccatccttcttatgcccacacacagctgctaaggcagcatttagagatcagactagacaatgaacttaaaagacctgtctagtccagaagatctcagaatatacagctagctaactcagagcttcagcccagaccagcagagcctctgaggacagcatccaaccagaggggctgctttgactccttagttctcctctccatgacactccatgaaatctgactaagggttttggctttcagcttgagtgagagtgaagtgagacaggcccgccttggcagatctgggggctggaaaggagggggctgctgtgctgaccttgtgccctgctcatgccaacgtgggtacagacaccaccactcacccgggctaggaatgcctcagagttcagcaagtgggctgtgtggctcttggggctggctaagaagctggtgaactggactttcccaatggccagatgtccatcctgtgctgcaaggaaggtgcttagtgctgactgcctgctgtccgagatacaccacccacagagcagagtcactgggccgttcctactaggacactctgggaagttgtagtgcgtgaactgatgtgggagagggaaggagggacagacagaccccggcagcttgctctcaatgttcccaagagatcaggcctaccacactgcctcccggtccgtttctttgttagagttcatgctggagaccacatagtccctgctcacattgctgctttgcatttacctggccgttctgctggagtctttgctagcctgagctgtagaaatacacagacctaagggcagaggcataaacttccccaggactccacagatagatgtcgcattcctaaatggtaaagactaaaaacctctatactcctgaacgttgaggaaggaaaacaaaaatgctcttagagaccagagatctttgtggtgaccatcggagtgataccttctcttccgatgtaaagacccaagagtgataagggctgaacccagctgtaaggtttggcaggggacacaggcttcagatatactccctcagcttcctttgctgtagtacattggtgtctcagggaaggacaaaatcctaggtgaaaacacacattgctttgtgtgtgtgtctgtgtgtgtttgtgtacagctgggcaggcacagatggagactagaagtcagccttgggtgttgtttctcagacactgtccacacggcttaggccgcgtctctcactggaaactggggctccctgactagactggcaggccattgagccacggggatctcttgtctctccctccctgttcagtgagcactttacagaatagctctctctccaggcccagtacacacactgcttttggaagcagtagtgctagtaggtaggaaccaagggatgtgtttgtatgcctgtgtgtctctgactgacagaaggtcaagttcactgtggggtgattccagattggtactgggcaagccagaaatggggtggggaaaaagggcctccccattcagtgaatgactcttggggatgaagaagcttttatggcctggaagggatagagagcctagtgtgcctcggacactctgcttgcccatgtgtgggctctgagaactgatcagagggaagcagaaaccatcttcttggtagccttgccttataagacccgagtgtggtggcgcatgcctttaattccagcactcaggaggcagaggcaggcagatttgtgagttcgaggccagcctggtctacaaagtgagttccaggacagtcagggctatacagagaaaccctgtctcgaaaaaacaaaaaacaaaacaaaacaaacaaaaagactccagcagaagaaaaaggcctagtcctgctgggtggggcttggaggcatgggctttgctaccatgtgacccagggcagtgcacttaatctggctcatgtcccagaagcctcagagcctagttgggaagaggacagaattcatgccatcccttctttctccgcctgccagggagacaaagtatgcctcggctcctcaggcaaacatcaacatgctctgaacattcacagagtgcatggccttcaggaatgagggccataacccgatgtgagtgaagtgagtcatagcctgatgagggagtccaatggtgtgtggtaggggtggggtggacatgtggtacaagccatgcctggctgcacaggtgacccctgagcttcacacacatcctgctctaatatgcatgcatgcatgcacacatatgcacatgcacacgcatgcacacatgcatttgtgaccctgatacctcctgggaccctggggatagtctactggtgggataagtgcacaatgttccggttttcagcggccccaggcctccctctgggctcagatcctgttgatttgccttctgcaaagtcgctttgggttttgtgtacctcgttggctatcttcagcctcctccggcattgtttgccctgcctgcatggattcccaggtctcagccctcagctgtgtcttcctctactagagcattgacataaagaaaaaaaaaagtcacgtgctgatggtttgctaaattccgtagcttaggtccctgacctgggtaccccaggcatgggctgtgcagattcccccactgtcatgctctcccgcttttgttgaaacctcagtctaccacataactccgctgctcagggtctcttctcctgggaaagcttgagtctgttgtgcagcgcagtgagctgacgtgaagacttcgtcgtggtggtgatggttggttttgagactgtgtaagctcaggctggcctggagctggtgatcctcttgctttaggcgtttgaacactgggattataagagcttaccaccatgccagggaaggctttctgaggctagggacatcactgattttgtttgatgttcataggagatctttagcaagtcttttgtttggcatggagccttttcctagtcctgggctccctggggcccagggtcagtgtgagtagctgagtagggtgtggttgatggatcaaaggcagttctagtgggaaatgtcgcaagcaataagatggagtgagcagagcagtatcttttagaacttggggtggtttgcagtctctccagctattcattcacctctagtttgacattcaagggtcaagaaggttcctgtctctgtccaccgaactcagctgttgtgggttagagctgactctgtgaaccgggcgtggtagtacatgcctttaatcccagcagcgcttgggaggccgagacaggagaatctctgtaagtttgaggccagcctggtctacataaaaccgactctgtaggacacatcattgcctctgcttttcttttctttgttgaaacagagtgccatgtagcccaggctagccttgaattggctaaagatgaaccgactacctctacctcccaagtgcttgcattataagcatgagccacaatgcctgggtaatcctagcttgagtctcactgtatatatcaggctggtcttgaacttacagagatcctctttgcctctgctttctgagtgccaggatttgtgcaccatcacttacagccccgggctgtttttactagaccctttctcattaccagggtcaactttctttttggtggttccacatccctcaagtgtgcttgcagaagaaagacggaaggccagcagacaggcagattcttctaggtgcctctcttggcaaccactgtcatgtactcagatctgaaaagaacccctgaccttgtggagatgtgcccatcctcttcttcctagcctctgggccgacacttaggatacaatgataagaaaagtcattgcgtccagttctcaaagagctccgagctcagtgggagagaatgattttaatcatccagaaacaaacgtgctaatgaaagggcaggaccagaaatcatgagagctcttgcctcaggaagtgacgctgatgggcatccaagtgagttacaagtgtgaggggcgagcagctaagtggaggtgcagcggggctgggccttttaggagggagaaagctctttctctctctctctctcacacactccaggctcccattaaaagaagcaggagactccttttcagtgggagatggatcagaagtgtgtgtgggaacagaggaaataacatacatagcctatttatttctggccaggacatcttgctgtgattgctggggctgcttgtacagatggtctgtttcttgtgcccaccccccaccccccagcctttccctctggactccaacattagccctgtccactcctgactcaggggttgtttgtctagcttactgctcctgctatggtgaaggccataggaactgggaatggcgaagccatgttttcaggtgagtagtcttgtttctgatgctttcctgggggccagaagaaatagaggtcttgtctggcatgatggctaacgtagagtcattccacctcatccccctattaagcaagaagttccctgttcactctcagatcaactgcaagatcccagtgctggcagtgtgcgagagctcctcttcatagaccctttcactttggaggctggggattgacctccagtaccatgagatgacacaggcctgcagtcccaatactaggaaggtagagtcaggaggtcacctttgactaaacaggaagctggagaccaacctgagctacactgagctcctgtctctcaaaacctgaagaagtaaaagagcctcaaaaacctaaaaccgtctcccactgaagacctttccatagtgtttgattttgaggattctgggctaaaggccagggaccccgtgctcagctcccactctgcactgctgccccctcctttgggagcctttctctctcacaccggggggaccccaggtgccatggaaaagcccagctgcagactggcagtgagggtgtttgctatggtggcctggtgcagaaagatggaaggggtgaagttatcccttggtttccacgtgtgtgcacggtggcacgcatgctccaacatgcacacctctctctctcgcatacattaataattaataaataaactttaaaagaaaaggtggagcccagctgggccaggctggttgccaaagcctgcgctcccaagtgtggaagaaggcgcctgaacctgacttttgcttgctcagtaagcaaacacactccagtcaccagaggttatgacagcagcctgcttccaggtccctttgttctgctctggggcctccccagccaggccccagcttctgctcccgttctttcttccataagcacacactcaccttggcgcatcacttccgtctcgtctcagtccatgatttccacttctttttttttgtttgtttttgttttttgagacagggtttctctgtgtagccctggctgtcctggaactcactctgtagaccagactggcctcaaactcagaaatccatctgcctctgcctcccaagtgctgggattaaaggcgtgctccaccactgtaccaccactgttcttgtttctatagaaaaagcttagtagcctaaagaatagaaacttattccttatagcctggaggctagagctctaaaaggaaggctttcctgtgcacagaagcctgaagttcatctctaagttgacagcactgctaggaacaagggagccctctttcccaggctggatgaagagagggcatcaagcaaacctctacccctttgttgagacagaattcctggctggcctggaactcagaaacctggctacctctactgagtgctgaaattaaaggcttgacccaccataacctgcttcgagataattctttttaaaacatcgttgtgtactataataaacattttatgaatttcaaatattaaagtgcaccctgtgtgtgtcttgcattctcatgtcctagcttcccatgtcccctctcccctctagcgtctttctatagattggcagttctagatatgttgcatgcttggggccacactgtgtattttggaggtctggctctttcacatcagcaccccattcccattccctcttcttacccaacaacactccaatgtatggctgtgtcttttttttttttttttttttggtttttcaagacagggtttctctgtatagccctggctgtcctggaactcactctgtataccaggctggcctcgaactcagaaatccgcctgcctctgcctcccgagtgctgggactaaaggcgtgcaccaccaccgcccggccttggctgtgtcatcttttatctactcattcaccgataaatgtgttagatgtgaagcactctttttgttgtttgcttctttgagacagtctccctgtgtagctctggctgtcctggaactccctctggaggccaggctggccttgaactcacagagatctacctgtgtccacctcctgaatgcagtgctgggagtgtaccaccaccacctgattcttaatttttattttatctcttgagatatctaactttgtagtttagggtagtcttatccacatgatcctcctgcctcagtctgtgccattgggcccaactcattagacctctcacatggaaagtcatgtgactggcagacagagatcagttttcttccaatttggatgctggtttttcttgcctaattgctttggctcagatttctagcactctgtggatccaaatgctgagacctccatggcttccttgtgttcccaatcttacagagaaagtgtctggcctttcaccccatgaaaacccacatctaaatatgaccttagttgtgagctttcacaagtgccctggatcatgttgaagaagttttttttttgtttgttttttttttgtttttgtttgtttgtttgtttgtttgttttgtatttctagcctagaaaatcggtttttgtaaaaaagagatttctttttattttatgtgtatgagttttagatgactatgcatctgctcatggaggccagaaaagggcatcaggtcccatggaactgatggtacagctggttgtctgccataatatgggtgctgggaaccaaatatgggtcctctgcaacagctaaggcatctgtccagtccatagtgagggttttgttttttttttaaatcatgaaatgctttaatgacaaaatttactaaattttgtcaagcacttttttcttttttctcatcaaatgagatgactgtttcccccttatttgtttgttttttgtttttaatttatcccagcacccaggggtaagttcttacccaggggtaagatgtctctgtaagttccaggccacctttgtctacagtgggagttccaggacaaccaggggtacacagggaaactctgtcttgagaaacgaagaaggaggaggaggaggaggaggaggaaaaggaggaaaaggaggagggggaggagggagaggaggaggaggnnnnnnnnnnnnnnnnnnnnnnnnnnnnnnnnnnnnnnnnnnnnnnnnnnnnnnnnnnnnnnnnnnnnnnnnnnnnnnnnnnnnnnnnnnnnnnnnnnnnnnnnnnnnnnnnnnnnnnnnnnnnnnnnnnnnnnnnnnnnnnnnnnnnnnnnnnnnnnnnnnnnnnnnnnnnnnnnnnnnnnnnnnnnnnnnnnnnnnnnnnnnnnnnnnnnnnnnnnnnnnnnnnnnnnnnnnnnnnnnnnnnnaaggaggaggaggaggaggaaaagaaggaggaggaggaggaaaagaaggaggaaaaaggaggagggggaggagggagaggagaaggaggaggaaaagaaagaggaggaggaggaacacagaagaacctgtttttcccttcccagcagccatcagcagcctgtagaccctaaagaactgtgggacccccatgagcctctcccctatttatttttctttaaaatttttttattcaggagttgtaaagatgactcagacgttaggagtactgggtactcttcctgaggatccaggttcaattcccagcacccacatgacagatcacagctgtctataagtcaagctttgggggctctgacaccctcagacatacaaacatacatacatgcaggcaaagcaccaatgcacatggaataaaaataaataaaacatcttttattcattggagcaggaaaggtggcttagcagttaagagcactggctgctcttccagaggccctgggttcttttcccagcacccacatggcggctcacacctgtctgtaactccagttccaggggatctgactgacaccttcacactgacagacatgcaggaaaaacactaatgcacatagaaattaacaaataaacttttaaaagttgtattcatttctttttattttatttgtatgcttgtgtgtctgcacacactacttgcatgcagagcctagggagtccgaagagagcagtagatctccccaaaccagaattacagatggttgtgagccaccatgtgggtgctggggacagaatccaggtcctcttcagaatcacaagtcctcttaactgttaagccaccttttccgagcctcttaccctccttatagctgagctggagttcattaagaagaaagggtttctttctttctagttttgtactttggattttggcagaaccttgctaggtggcccaaagccatcacctcagactttcagtattcctgttcacttctggattgctgggatgacaggtgtgtgccaccacagctggctcaagaggaaaaggctatttatatacattaaagaggtggagggggggataagacacagcaggatacactccagggtgggtgagcaggtagctgacttcatttcctcactgagctatacatcctgtagttcactcttattttcctgggggtccagaagaaaggttagtttattgaccttcgatctttattttcccagcatgcgtgctgacatgcattgctgcacctgtgtgtttagtacagaacattttcattttcacccatctcaaaagtattttgagcagggtgtgttggtgcacgcctttagtcccagtgctttggaggcagaggcaggccgatctctgtgagttcgaggccagcctggtctataaaacaagttcctgggcagccagggctgttacacagagaaatcctgtcttgaaaaacaaaaagagtactttgaaatatttccttagggattgtttttctcagatttattgcatatttaggactgtggttcaatttacatttagttgtgaattttacaaacttgttccgttgccagttctgttgctaatttaattatagtgtgttcaaagaacatccttattatgacttgaatactttaaaattgatggcgtttaccgtgtgtctgggctatggtctgggaacactggtccactcgcacttgagtgtgcatgcggatattgggtggagtgtttcccagatggctattagttttagttaggtgtagtgattgtcaagtctttaatcttgtacagtgttgttctatttgttcctgtaaggaattgaagtccccaactattagagttgaactgcctgctttctttttttaacttagttgccttatgtattttggggcctggttgttaggcatatatacacttataatagttgtagctttctagttccatagcccctttgttagcctttatcttcagtcagctcctcccctcccctccttaaagagacaaaggctttcaatgttcaggctaccttcaagctgctgtgcttagactcctccaggcttagccagggagttgctgggactggaggccttcacttcccagcatgcctctgaagtctgatgtcatcgcacatcagcatagccgccccgcccccgccctgcggcacccctcccccacccctctccccgctctcggacaggtggtcacttgacggttttttcccattaagtaataattctgcttgggaggctgagtcagagggatctctcacaagttcaaggagaatctggcctagatgtgagttctaggccaaccagagacagagagcaaggcttcatctcaacaacaacaaaaaatcttcaacctgtttggttttttttttgttgttgttttttgggtttttttctttgcatctaaaaatgtctctcgtggataatacttgtatctctttttctcaatcaagtttgatgatctctgactttggataagatcatgtaatctaattcctgatatggttggatttgcagtgcattttgccttttgctttttatgtgtctcaagctttcttatctatttcttccacttttattgcctcactttgtattaagtggacattttctagtataacattgtaattgcatgtttttaaattatttagggtttacaatctacgtcttattattttagaatctatttcaggccaggcatggtggcacacacctttagttccagaccttgggaggcagaggcaggtggatctctgtgagtctgaggccagcctggtctacagagtgagttccaagacagccagggctacacgatgagaccctgttttgaataagnnnnnnnnnnnnnnnnnnnnnnnnnnnnnnnnnnnnnnnnnnnnnnnnnnnnnnnnnnnnnnnnnnnnnnnnnnnnnnnnnnnnnnnnnnnnnnnnnnnnnnnnnnnnnnnnnnnnnnnnnnnnnnnnnnnnnnnnnnnnnnnnnnnnnnnnnnnnnnnnnnnnnnnnnnnnnnnnnnnnnnnnnnnnnnnnnnnnnnnnnnnnnnnnnnnnnnnnnnnnnnnnnnnnnnnnnnnnnnnnnnnnntgtttttgagatagagtctcactatatagcttcagccagcctggaactgctagatagactaggctggccttgaatttacagatatccaactgcctctgactcccaagtgctgggattaaaggtgtatgccacctagccagacccaggatctacttcagatttatgctaatttcattttagtgatgtggactaaggatgtggctcagtgttagttcttgtctactgtgtgtaaggccttgggtttgatcccgcaccgagaaaaacgttgagagtagacacttggctccatacccacctgcgttcttcccgtgttacgctattattgttctgtatcatgttacaaatggaaaacacatcataattataaagttatagctgtcactttatattgtgctgcagacaacctcgtatgttctcctttacacgctaagagataaagggcagcaggcaggcacacactcgggaggttgtataacggcctttccatcgctgtctctactccccactgtttcccgtggcttgtttcccttttgtctactgtgcctttggtatttcaatatgttgcatataattctgtctagattctactatcctgacatatataagtgttttatcttactcgattgtttcccaaatcagttaagaaagtgaaaggcctttgtggtcacacgttctcctgcacactgtggctccctcaggcttttgtgtgcagactagactgactgctggtgtcctttgctttcggtctctccctttgtggtttcttgtaaggcgatctgtgatcgcagttatgttcttcctgctaagtcttaggttctgccttcttgttaatcttgttaatcagataacggtttcattttgacttcattaacaattatccttttccctacagatttttttttcgagacagggtttctccgtgtagccctggctgtcctggaactcactctctagaccaggctggcctcaaacttagaaatctgcctgcctctgcctcccaagtgctgggattaaaggcttgagccactatgcccggctttcctacagatttttaagcttacttgatgtatttatttatttttaaatattttattcttaataatgtgtaaacaaacatatttgtgtgtgtgtgtgtggggggggtgttctgtgtgaagacaggagcctgcaaaggccacaggtgtctgatcctttggagctgaagttacagtagttgtgagctgagctccccagcctgggtcccaggaagtgaccttgggtccctgcaagaatagtatgttctcttagctgctggaacatctctccagtcctattatttttaaatcaggatcctatattgccctggctggcctggaacttgctatgtaatccaggctggcttggaactcccagaaatctgccttcctgtacctcctgagtgccgggattaaaggtatgcgccacaacgctcagctgtctgtgtgtttgttatttgagatatcattgaccccatccagccctgatgggtcaggactatagtcccagatacttgggactccgaaggcaggaggatctcaagttcagggcctgcctgagccatagagttggtttaagggcagcctgagcaacttaaagagaatcctttttgatcctaagtaaaaaggaagggccagaatgaatttcagttgatggaacacttgcagagtgtattaactacttttctgctgctgtgataaacaccatgaccagaagcaacatagggagaagggggcttatttctgcttacatttccagtctatcactgagagaagtcagaaactgaagtagaaatcatggagaaatgctgcttactggctccctccctggtatctgaccaactggttttctctttatttctctttattatttttgagtatgtgtatgcttgtgtatctgtgtgtgcgtgtgaatgcagatcactatggaatccagaggagaacactgtatcatctgaagctggagttaacaggtgtttgtgaggtgtgtgctgtagatctcttacaggacctctgtaagaacagaatgtacccttaacctccatctctcagccccttgccgacttttgtacacagattatgacctcctgcctccccagatggcgctgttcatagtgggcagggccctcctacatcagttaacagtcaagaaaatggcccccaggtttgcccgcaggccagtgtggtgtaggcaattcctcaacagaggttttctctttccagtgtctctagcttgtatcaagttgataataatagtgaattagtgcatcttaaatgcacaaagccttaggtttgatcctactaccatatagtatatgtgtgtataatatatatgtacacacacacacacacacatcttgaagtggcctaggcaaacactctaccaccaggctatatccatagactagttctttattaaatacatcatagttctctagagagtcatccacactgatgcatctatcagcgggtcattcatttttattgctgattgttggtttatggcgtccttgcatcagtttgtttgcacatttgctgtttaagggcatctgggatgattgaagttgtggtctattgcgactacgccttctgaacgttcatacagagacagactgctttacttcctcctttctcccagaccttcattccttttctttcctgacaatatcctgctatgagttcagtctggcctggaattttctgtgtagtccaggctaacctaaaatcaggatgctcccacccaagtgttggggccaagggtgtttgtcaccacgcccagctgcacatactttttagttttcctgggttaaattctcaggagtttaaatggtaggttaatttatagttgcaatcttttgtttgtttgtttgtttattggttttacaagacagggtttctctatatagccctggctgtcctggaactcactctgtagaccaggctggcctcaaactcagaaatctgcctgcctctgcttcccaagtgctgggatcaaaggtgtgcgccaccacacctggccttttttttttgcaatcttaatttttttaaaaagaggatgaatgttttatttgtttctcagtgttgcaaagctggtgcttcacggtgggaaaacaacagccaacacagcacatggtgaaacaaagacagtactctcctgcctctgacactgtacaacacttccctgcattcccaatgagaaaacactaagtctctgacccaaatccagtggtggatatgggcaaataacaaaattatctaagaaacaccactattatcttgaattatgaaagtcttatacccagtaggtagggtctcaccatgtagctgtggctggtctagaacttgttgtgtagactgaccttgaactaacatctgcctgttgcgtgctgggattagaaggtggtccgtcaccaaaaccagcctcataaccacgtttcactgcagatgatcctaagaattctaaacaccagggcttaacccctagtctaaatacttagtatggcgattatcaaaaacctgtacattgtgtttatctgcatcctttaggaagttgggggtgggtcttaagtagcactgtcaagaacagtttctttccatcagtattgctaaaagttatttcaagtcctctattctccactagtttaagacaagcatgctggagcaggtcacatccagtttgatctggagtggagggatgggtgccatggtcactcctcaatggacttcacatatttttttcatatgcttcttcactcatcaattcatccagctctgaagggtcactcggtgtcatcgtgatcagccaaccatcttcataacaggatttgttgacaagccctgggttttcagcaagtgcttcattgacttcggttacctctcctgacagaggagaggagagttcactggcagccttcacactctccaaagccccaaactcctcttgttttttcaattttgtcccaacttcaggcagactacagtaaacaacatctcccaaagcttcctgtgcaaaattgctggttcccactgttccaataccttcctctgtcgttatccattcatgtttctctgtgaatttacgcaccaacagcaaaacagatccggtgcgggtgcgcagtgagcagaaggcggcggctcttggcggcgctcagctcccagggccgcagcgagtagaaggccagggcggtgcgcaggctgtaggccacaatccgcaagctcctccttgcagcgacacgatcagaggtccggaggttaactgagcttcgcctctgcgggcagcaatcttaattttaaaaaatggcagattgaaggagctggagagatgtcactgtagttaagagcatgcacagttctccccgaggcccagagctggagccttagcacctgcgtcaggtgggtagctctgaccctcagggatctcactcctctggtctccaccagcacctgcacatcacccacacagctgacgtacacacaaaagtcacaggaggccattgtttcaggcaggatttggtggcacacatctttaacctcaaaacctcagcatttaggaggtagaagcaggctatgtagaaagaccctatctctttaaagataaataaggttacaaatgtgcaactgactggtatacacctctctctctcctccgtgtagctctggctgtcctagaactcactctgtagaccaggctggctctgaacacagagatctgcctgcctctgcctctgcctctgcctcccaagtgctggaattaaaggtgtgtgccaccactgcccagctacatttcttttaaaaatatgtacatcttgtcataaaattttcaaactgtttttctatgtatttgcagtaaatatatattgcacatatatacagcatatgatacattgtgtatctgtctccattgccttctgttctccccttccttcccgctgagccattcttcccagctagtctcctcactcccccacccccaccccgtggcttcatcattgaagaaagtggcactccctctctcagcagtcactaacaaccactagctccgcagaaagggatgggacctcgtagggaatccttcgactcatgatagaatgatgacgggtctagtcttgtgcagggatgcatggctgctgtgtgctcatgactgcatcaggtttcggaactgcagtttcatggccctcacagttacacccccccacacacacacacatccctttcctcgctgctccctgcaccttggagagagcacattcttgtctgcctgcattgcctgagcaatccactctccctgcatcctggtcagcgctgatactgtcctcgttttgttgttgtgtgtgcgtgttcaaaacagggtctcactatgtagctctggctgtcctgaaacttcagtttttaaatttttattttattatgggtatgggtgttttgctcgcaaatatgtttgtgcaccgtgtgtgagcctggtgcccagagaggccagacgagagcattggattccctggaactggagttacagacaattgtgagccaccatgtgagtgctgggagttgaacctgggtcctttggaagagcaactccagagccaactttccagcccttctatgacttacatttttttcattgtctcacatttttattataatatatatatgcagatctgctaaatactcagtaatagatcctatcagttagccagcataaggcgctctgctggcaatctacctcaggtcaggtacaactcctcgtcactctccagagcttaagacttaagcgctgagttcagtcccaggccacaaactaaatcaagacactaactgcactaaggacacacgtgagctgaaaggaacgcggaatcaggcggaatcaacggcacattttaaaaaaacaatattttctgagacatggtatgtagctgaggctgacctggaactgacaaggtagctcaggctggccttaaactcacaatgttcctgcttcagattcccgaatgctagaatagaggcttgtgggcttctttttaaattttgtaaaatttagtcactgcagttttaattcaaaggcgttctttgtgtccgtatttattttattgaggcagggtctcgtgcctcccagcctggccttcagttcctggtgcaggagaaggtaaccatggatttttgatccacctgccttctcctctcaagtgctgaagtgattacaggcaggggaggccatctctggaagtagcactgtctgaatgtcacaccaaagaccttccccagagattgggtggggttcccgaggctgttagtagttagcagtcctgagcacggctctgctctctgtgtcccggccctgttttccttcccaatggcttctagagataagtgcctagatgtgtctgtaatgagtgtggctctctgagccaaacctctccttccgtggtacctggcgtctctgtcttggcaaacgggttgagggtgaagtcgaagcaaagagctggagccaggaattctgaaagctgcagggtcaggcccctctcaagctggttttccactaaagttgctccaggttcaatctttcatgaaggctgattctgtgctagcctagtttctaccactcaccccccaaagcccccaaaagcaaaaaacaacagacagctcccagctttttgtatgtgtcactagagtgattttgctcctgaggaatttatcttctgtatttttcaataggaggtatgtattagatttctgaaaacggtaggatttgtttaaatgagtcacagcatttggctaaaatagagaagactccatctggtgcctttgcgtggtctccagttctgttctctgcgagctagaagggaaacagaacttggtgttctgggagctcaccatgacaggactgcattaccttttcaggctcagggctctcctgagcaatgccaagggggctctccgttcaaggcctctgcactgggcccaccatatttggaagcgtgaggtggatgggcgaggggacatgagctgagggggactcagctctgccacctaattctttgggagtgtccttgaggttgcctcttggagattacaaagacaaacctccacagcagggctggtttccttagaccctcagcctgctctgcccacataatctccctcaagtccttcaaggagcagggtgactcaacctgtgaccaggctccctgagggtaggtggcagtgccccaaatcaggaagggtcatgagagcagggggtcactcataggaaggggggtgggttagttcagggagaggcctagttctgatcctaactttgccttgatgtgttgattcctctcttcaaactttttcctcatctggactgccatcacagtgctgagattggccgccatagtggatgtaaaggctctggctgaaagtggctaggttcctcactcacccccatggtctggcctgtccctcctgcactctgtgccctttttccttggtgacagattgctctatttggggtgagaggaagtgtaccgtgggttgggccacagtacagaggatgctgacagcccacgcagctcctgtagagttgctcctggagtctcgtgctcagtcatcaggttggcctgccccgcttggtcctatctccctctctttgcacacctagtcaaggctgcacccctctgttgctgcctcctgaaggacagctcttctgggacccctgaggtgctcagatcctgctctgctggtctcattcctgctcctggagacaccagtctctgacctgtcagagaaagtgaccacgtccctctaactcattattcttggcctgctgcggatacactgtctggccagtgtgggacaaggtgctcttcttccagtggggtcacctgaagtgacgatgtgtccgtgtgagcaaatgcttttctaataatgcagctatggcaggaagctcttgcctgggttgccattttttggatatttttgaagttactgaactagtaaatgactgaatctttgtctcaagggccatgtaagagaagggccgagctggcccattgggtttggagaaccatggctgctggcaggtttgttcctggctcccggggagcctgccttattgcagaaatgaggagcagacgaggcctttgcagcccctgagaggcgtcctccgattttacacaaggattcattttgtctcttccctcgtttgtaaaagtgatatagtataaatgaactatttaaagtgactccccactctaatacatccacagtgctgcgcaggagccgcctgtgtggttctcattttatctcttcaaagaaaactagtgctaatcagatggcgcagagggtaaaggtgctccctgaactagcctgatgacgggttcgattcctggtacctgcagtgaaaggagagaactaaatctaagcctctctctctctctctctctcacacacacacacacacacacacacacacacaccctgcataaattaactaaataaggtttttaaatcaatcccaacatcgggaggctgatgcaggtagatctctgtgggttcaaagccagactaaatagcaaattctaaaacagccagggctacatggaaagactctgtctcagtaaaacaaaataaataattaaaaataaaatttaaaatccaagtaaaagggctggagggctggctccatgtggctcagaacacttgttgcttttctagagcagaggacccagggttggttcccagcacccacttggcagctcacaccaccatttataactccagttccagggatccaactccctcttctgacctccatgggcacaaggtatgcacgtggtgcccagatacccatgtaggcaaaactcataaaataaaacacattaaatcaaaataaattaatcttgaaagaataataaacatttagaaattactaatgtttaaaagagaacccccgttccactaattacttattgctgccttcgttcccgcccccaaccccacccctgcccctggcttcacggttccactgtttatatatctacacatttgccttttctatacatttcataaacatagaataataagatttgtctgtttgtgtttcacccttccactgagcaggtattttagttttatttacattatagcagaacctctgttgctttttttactgggctaaaatgcacatcatataaaatgtatcatttcaagtttttgtttcttgcattttattattattactgtgttatatgtatgacctgtgtgggggctggtttcatgccaccatgtgtatagaggtctggggacatctctgtatgttctcactttctacctttacttgggttctagggaccagactcagatggtccatatatgtggcaagttacccacgaaagcaccttggtggcccagattttttttttatcagtctgcactctagactggcttcaaactcacggagccctcttgcctcagcttctgagtacaggaattacaagcacgagcccccacgcccccatggaagcatacagttcagtggtattgggtttgttcatatcgtgaaaccacaactgctgttcttccccgagcctttcacggtctcagaccgaaactctgaacctgctgaactgatactcttcccccgtctctgtgaattcgacctacgtatagttctagggtaccttctgtaacacctgcttttctgagaccgcttatttcattagcatgatgtctttagggctcatccctattgtggcatgttttctcatttcctcactccttagagctggtaaaattctgccatatgtatgtataaaacatgtatgtaggcatctgtcaatggacacatggtttgccaatatgtttgagatgttgtgagcattgcagagatccttgaatatttgcaacagcctagtggatatctgagtgaccctgatggcttgaaaaggtcctatgtcctggcctcccagatcctccccctgctcagtcccccatggtacggcccccagcatcactggcctgcttgttggtccctacctgcagtgcgtacttcagtcccaaagtctatggccctgccattgctccctcagatgccctcccctgggccttgcgtggtacaactcctggatgcttgcagcgcccctccttgtgcgccctccttcagaagttccccacttcctccctcaggtttttccaacacctctcatgccctgaatttgtcttcttggtttttttcctgcatcctgaccataaggcaagttccacaagatgagcagctgtgtctgcctagctcagtgccaggccatcaaggctgcagagcagctcggtgccaggcacctgctccctgggagagcctgattcacagtggagcagcaccttgtaaaagccgatccctttcctcctgagtttcccaccagtgtccaagtctctgccgcatcctctatttctgacaccccactctgtttccaggaaccccaatgtgcccaggtctccagccccttcctccctcaggccatggcctgagcatacactgttccccttatcttctcagcaggggtgtgtggcctggatgcactcacccaatcctggacagtggggttggctaagctttgggcctgtttcataacctgactctcagaccctggtctctccccctctcagacacagcgcatgcagttcttccgtttgttttgttttctctctctcagagttgctggctgacttctcattacttcccacttccccgagactttggcatcagaaccgtaggcttcctgcccactctacttgctaccaagccagggaaggaagggaggaaggcaaaagctaatgttttcctccgtgcctactgtgcacctggcatctctgttccttatgctggcatggccctgtgttctgggttggcccaaggtggccctggcatggtgactggcctgggctgttgttcagagctccctttgggagcagacctccttgataattcagtggctatccctgagccatggcgaatgtgatcacacatgtactcatgtgctcatgcatgtacacacacttgtgagcactactgtgatccacatgcacacacatgtacatatacagtggtatagtgtaggctagcttcaaaaggatagtcctgcctcaaccaacctcctaagtgctgggattataagcgtttgtcacagtgggtcaacccatgtcagcactggtctcaacctgtgagtcattcacaacctctttgggatgttgtcaaacaacatgtttacaggggtcacctagaaccatcagaaaacacaaatatttacattatgattcataacattaacaaaattacagttatgaaatagcaatgagaaatgtatggttggagtgggggtggggtcgccacaacacaaggaattgtgaaggaccacggcattaggaagcactaaactagaacgttagtgtctagatttacttaggcgtgtgagagttctgtctgcatgaatatatgtacaccaaatacgtgtctggtgtctgcagaggtcagaagagagcgttgaatcctctgaaacttgatttatgggtgtttgcaagctaccatgtgggtgctgggacctgaacccaggtcctcagcaagaacaaacatgttttaacccctggaccatctttccaggggttatagagccctgggtggccagccacggagagggcttctcttggtgaaggggcgttcaggcacgtgaaggttattaatgttaagctaaattaaattaaaaccttaaatgagagttttgacctaagtcagacccattgagctttagtgaccccgtagctgaggagaagttgagaccccgcctctacagcaagcggtgggcacagaaaggcatcttttgccagaagtcggccactggtcactattctcactgatggggaactgtccacaggaaggtcatagaaatggagctctcaatattcttatgctctcgggtttgaggaagaggaaaagccagcgcctagagcctcagttggacatcacaggcctgtaaacgcagggagggcatgtagctctgtaagcacagcatttgcctagcttgcctgaggctctgggttcacgctccagcttcatataaaccgggcgtgctgtacacatctatggtcccagcgcttggatagtagaggcaagaggatcagatgttcaatgtcatccttggctatgtagagagttcgaggccaacctgaccacctgagaccctgaaaaccagtataacccacagaggaagggctggagcgatggcccagtggttaaaagcactcgctgctcttgcagagcacctgggtttggttcccagcacccactcggagctgtaaaaccatctgaagctccagnnnnnnnnnnnnnnnnnnnnagaagggagggtgagttggggtgggatgtggtcaggtgtggcatcaggcttccttgtctacaggcagtatgggaagaggaaagggcctagactaggggtcccactgctttgggggatgtagggtagtcatcctggaggtgcttctgaaatcaaagtgatggctcagcagtgtggctcttccaggcttccttcacacgtgactgatggtggtagttgccacaggaaacacaggtcttttcaagtagactttctgaataagacttctgagcagatgctgtcatgatgtttgtctcaagctttagagtccttccccattcctgtctgtcattggccaggcatgcctggtaggctccatgtattacagtgggtcctctgtgtcctatgcccatggtgttgcccttaacacagagagcctctgactggaccctgaggactctgcctatctgtggaaaatgttagatctctctctaattctcaatctctctctctctaattctcaatctctatctctctctctctctctctctctctctctctcacacacacacacacacacacacacacacacactcaagttcctgttatgtcatgtgtgaaaagtggagttttgtgtgtttgtttttttttcattcttttgactgtaataagtttgatcgtgtaaggcaaagattttatttctcttttgacacctactatctctttaaaaatatttttatggtgtatgtatatgatgggggtggataggcacatgccacagtgtagaggtcagagggcagcttccatgagtagcctttcactgccactgtgggctctggaaacaaagcgtagctgtcaggcccttgcttgctcacccattccctgccccccacccgctgttctcatgctaacttcagtcttgctgcagaccagtgctggaggccctttgtcaacgtggggctctgctcaagagtcagcacagtgtcctgggctgcaggaactgaagtacagtgctcacagggtgacgtgtgagtggaaatgggacattctgactccatctataacttttgtataattttgtacctttctgtttaatgtgggtggtgtgtatgtggtgtgtgtgtgtgtgtgtgtgtgtgtgtgtgtgtgtgtgtgcgcgcgcacaaacacaaatgtgcatgcatgtgtgagtacatgcctggcatggcgtgtgggtggaaggttagagaacaacttttccagacttggtttttgcctttcatcacgtgtgccctggtgttgaactcaggtctttattcttggtggcagtgcctttacctgcttggtggcagtgcctttacctatgcttggtggcagtgcccttacctactaagattcttcatagtcctcccttctgtcttctttcagaactgaaatggaaaggaaacaataaataaataaacaaataaagtcaatccccctgaccctttttttcttagcattttgagacacatttttttcttattcttatatagaaaaccaaaaagaaacaggaatattgctagtaagttttccatttaatatttttttaaaaataaacaagaagccttgatttcacatctctttttgccttttattatcttagttattattatttttaagtataaagtataaaataaggggttttattataactttagttttctcctttctttgttcctttctgtctttcttcctaggtaaggtctccctggttggctagaaactcacagtgtagccaaggctcacacctctacccagtgtgggctgcctcgccccgcttatgacatttcttactgaatatctcactttgcttatatgtatgcccctcccattatgtataaaggacaactttttaaaatggagtaggcaaaaattactttggtgtttctttccatgagtgggacaatagatacagtttttaaattctgttgactccccaggagaccaagacaagaggtgtcaggctagcagctttccctggaaatccaaacagcaggctttgtagcattttacaccagggcgtatctgggtctaagccatatcccaagcatcacagatgttcagcctattcaagtattagtgatacaaaccctgagttatccaccaactgtgctgttggccatgtcttccctcctgtgtgtaaagcaggactccggccatctctgtgggctgaggagattttctggaagcccatggaagcaggctgagactgagtctctgagtacagactctgaaggttaagcagaatcttgagtttctagttcatcatcctgggtttctcatttccagtaggctggggactggagctggctttcgccatcgtcacaaaggctcacagatttccagggcttatcttgacttcccagttgcatcgggatttggaagagactcattcactgaccccttggtaaatgggatgtagtagactttgcagtcgccagcacctgggaacagctggctcagctttgtgcagtgacttatgcctcctaattgctgtcctagctttgggagcctttccccttcggttggaaaactaggacagtacacagctcagaactgcctatgtggaatcccaaagagataagcaaaagctgggcgaggagcaagagcctcagcgacctggtcgcactggaagccacggctctcagagggctgtagagacagggccagctaagcagatccaggaagagaagtccaaggagatatctggtgggtctcaacccaatcacaacagaagagaagagccaggacgttccttaggtctcaaatggagtgtatgtcacacctctgggcacagagaaagcactgtgatgtgtccaaacaaaaaccaggttcaggtatttaacaagtgaaaaaaaaagagtccctaatgactgggtcttcatttcatctggtggtccatacccagggccatcctagaaggtgacagggagaacgcttcaaggagttatctgcctgggcctcagtttggggtagtgcctctggcctggatgcctgcctgtcctctcttccttctctggcctttttggctctcagtaggaatgcccacttgcgctgtctttgatgggattcagtcacagctgatgagcgctgagcagtggtgcaggtgtgcagggggcagagggagtcaggcaaggaggcctcataggcgattgcaaagctgcagctaaagactgcagctctccgctacagtgttgtgaatcctgttctttgcctcacctcctttgggaatttaggagtaattaaccagttgaaccagaactttgtaatggatgaatggtataaacatgtctgtctaattcacctaaaaggagccctagcagggtcatttctacaaaccttgcctaattatagtttttttttttcaccagttaattaaaacacactatgaaacttgcttcctttagctcacattacaaaagttcagggaacccaagttctcatgggagctcttatcctgacctggaagacagacagtaagccaataatatcctacagggaggagactcaggcacctaacacctatggaaggtgaccttgggaaggtggcctggggtggcttcacaccagaggtcaggtttacatggcactttggggacatttagttggccttcgggtgaactcatgacatagatttggtaacatactcagtggtctgtgagttcccaggcttcacccaggccttacatgacagtggatgcttatgaacagagagacgctaagggggtagcatgtgctcatggctagaccagcatggttatctctccgagggcctcaggagatctgggaacttcctgaaatttaaataaataaataaataaataaaaaggtccctgattgattcatccttccacctaaggaaaatgtctaacaaagagaagaggtctggctttaggaaactccagaacttgcacagatggactcaagagaaaaatgactttgttttggtttgtaaatgtgttctggttaaacatactaagtaaaagcacctctctgcctagttcctttactgatctaacccaaagctttaagaaaaaaagaaggaaaactctgccctctgtcatccatggactgaaacacaatgaactaagaatgctttccaagtacgggaccatccatgggaacgagggaggatgctgggaagggcaatacacctctaggatgagtacaaggggctcagtggatgcatcagagtcagtaaccgtctttggcaagttagctctgtgaagccaggcagtgttagagaggtggctggcatttgcagggtgtggcaggtggcaggaaaccaccaattgtcagcagccagggacatggaacaacaaaggaaattgaaaatagatataattagtgtctgtgaaaaggggaacaaaacaacggaatgtagaaatattcaaagatatgattaaagacaaatcctcccagtgaacacattaagaatgtgtgtgtgtgtgtgtgtgtgtgtgtgtgtgtgtgtgtgttcagccaggcagtgatggcacacacctttaatccctgcactatgaggcacaggcaggtggatctctgagtttgaagtcattctggtctacagtgagttctaagagctacgtaatgagaccctgtctcaaaaacaacagtaataatgagagagagagagagagagagagagagagagaagggccaggcccaacttagactgaaagggcatatgcagtggtgtcaggaactactgacgtggattataaatgaaaaagaaataaaaaggaaggtcatgactgctcctaggtgtggcggaggggaaagtttactgtagatttgtgagagagcagagccaaaggcagacacatctgagagtccggaaagaatgtgaccaaactgacctgggccatgtggggagaggaagagaggcatggaggagagcggtacagcagtcgggaagccaaggtatagtagggtggattatatagggaagtgcttctaggggagggacagccagtccctgggttggagagttcagggtccagggcagggtgtgccagccatcgcctgaagcaggtagggactgagggatgctgggagaacctggagaccaggtccactttgatatgttaaataggcacctctgcccaccacatgtcccgggtttgaaacttaacagattgtccagtgcccaaatatatgttggtgaagtcaccaaacattaagagttcttgtttatctagagcagtggttcccaaccttcctaagctgcagccttttccagttcatgctgtgttgacccccagccatgaaattatcttcgttagttcataactgtaattttcctgctatgaatcatataatgtaaatatctgacatgcagaacaggttacaaacaaccgatttagagggagaaagttaacctatactaaaggaagacagtcagattgagccagcattcttctctgcgggagcagtgcgtgatagaaaacagcgtgtgatcctgccgagtcctgagaaggaaagtgtggacttataaatccagcgggatttatgtcccgctgaaccactgttcaagtctaaggagcacaaagatgaatccagacattcaaggactcagaaaatgtgactctcatgaattctttttgtacgaatgaatgaatacacatttctagaggtacagactatagtctgtagacatcaataataaaagcctgtggcgcagtagcccttaggctgaggctgtggggtcaagcactcactagcctgcaggaaaggtgtagttcacacaatgcctgccacaggcgccatcagccttcaaaactaggtggagcttgtggcagttggtgctctctgttttccacatagggacagtgagagcttcaagaggtggggcaagggatggaggaagagaggggtggggaatgggacttggggaaagtcaaaggtaaaacattccactgtatgccttctgttttctctgtagtggggaatgaatttggcccgaggtgtgtctgagcgtgcccctctaaaagctagctatcactgcacacatgtctcagggtttggtaagtctatgacctttgtgcctaactgaaggcagcggcctttgccacctcggttcctgccttagtcagtgttctattgctgtgaagagacacacagacacacttactccaacaaggccacgcctcctagtccttctctcagagccactcactccctcataactaacgcttcaaatatgtgagcccacgggcggggcagggtggggcggggcattattcaaaccaccacacttcaagcctctgagagtactgcattcaacacacttgagctcgtgcgggcacacacacacacacacacacacacacacacacacacacacacacctacctacctaaaaatacaatcttaaaaaagactggcgactgggcgtttacgagtttcctcagcggtggcttctaaactagggcacatgttgggtaggaggtggaacaaaggggaaaatctgaatactatttatgtcccctttttttctagcccaggctagtctcaagtcatccttgtagccaggggtgaccttgaccttcggatcttcctgcccatacccccagagtacggagatgacagccaccggctgagctgcacccccagacctcttaggttaattttctatcaaccatcctctaaaaccttcctatggtgtttggggtggggggaaggattttatcagtaactatagataaatatttatatgttgggaatgcagaaacatattactgacaggatcacatgatcaaaaaaaaaaaaatgcaggcagcctctggcctgcagactgactaaggaggtgtttcctatgtgggaactgggacccactcctgagggaggggctgcagaatccaggcgctgcaccctggcgcccaccattgcacaacctttgcttctctgccggcgcgcccggagaacgcttggatggccccaaaggtgggggtcccactgtgtttgtccgcctctaattgcccattactgaaaggtcagccatgaatgtttgaaagccttatttgaagctgtggggttcttccggctgctctgacttatagagagtatctttaaggtaccccacctcctgacagacagagatggcttattaatttgagtcatctctctttcacctgaaggagagggtggggcatgctctggatgctgccatgtggggcccacagcatggtctccttctgcctccaccctggctccactcctgcctgcacttctttcctggagactccagtgctagcaggcccttgctgatcacaatacccagacttctggcttctggcttctggctgcttcccactgtggaccaggcagtcacctctgtcccaggttacctggctgtgacctggtgtctgcagcatttttcagccattcaaacaaattagttgtttgcctctctgaccaatgcactacggattatgtctcctaatggtgggtgtggatgggacagaaagccacaaaacttcttaggtctggtgagggagagcgaggctggttggctttgtgcccttcctgaaaggagtcaagggttcctccctgccttgacaaacagggttgggctaacgttattggtgagcagttagtggtcctaaatgttgaaaggaaggaaagctgagagaaaagagcgtttttcatatccttggccttgctttgccatctttcacatgcatttatcttttgtagctggagggatggctcagcgattaagagagcttgctactcttgcagaagacccaggttttgttcccagtacccacatggtggctcacaaccaccctttactacagttccagggtatctcatgcccccttctggccttcttgggcaccagtcgtgcacgtggtacatatacatgcatgcagataaaaaggtcagacacataaaataaaaatctaaggaaaaaaaaagcaggcatttttagttttccctgttggcttccagccgcccctttctatctgccctctctgcagactgaccctctgtgcctttctttgtagaagtatctgcctttcttcctttcattttatccttatccccgcacttcccaagacacaggctccctaaggctgctgggagtgaagggccgggggtttcactggtgtcctgtgtgcgaaggtcgggtctttcatggggcaggatggtcttgcatgtggacgtctccctttctttttccttgcttccagcagtcacgttttggtggagatgtctgtccatgaaggcagacctcctaggtcttacttcctctgtcctcaggctgtccctgctgcttgagttgtcctgggatctaaatagtcatgactcttgagctccatcatggagggaccttcgttaagcaggaggaagaactgtaccgagtctggggagaccttgggctgccatggtatggttgtatgggctttataggagcagccattttctcctgcaactcagcctcggaggaatagactccatttgactttttcccaccctccccacatttcactgttggctgctgtccagtatgggagcctttctaaccctctgtggtcatttcctctttccctccctccctccctccctctctccctcccttcnnnnnnnnnnnnnnnnnnnncctccctccctccctctctccctcccttccttttttccttcctttttctgacataaggtctcactttgtagccctggctgtcctggaactctctctgtagaccaggctggcctcaaattcacagtgatccgcctgcctctgcctccagagtgctgggattaaagatgtgtgccactaaggccacctatatggggtcattttgttctgcctttttttctgggctttcctctgagcccatgaatgctgttggaccccgcctgctttcctgggccactgctctttgggtgacctctgctctggagaattgcctgtgacctgaactcactctcttacataaaactacctagacctaaatggtaagatccccgcccccctccaatcttcaacacaaccaaatccaaactcggttttgcttttgcactcctcagccctgactggctttctgctctgtattccccacgggagggaaaagcagcaatgatgtcttttgttggatctttcctccctccaattctatagatcgtctcctaagctattgcttcctcctcactggattcccttcctccatcacatcgtcctctctgtggcacagggcccaaatgcacctgcgttgggagaccttaaaggccctgttgtcccggccctccctatgttccgtttgagcttcccaatgaattcaagtcatccaaagatgctgtcaggagcggttctaggtggtgggcgtgatactggtttgcacacgacactcttgtgccttcctctgccatgctgagcatgctctgacagcctctgagccttccttaagtctagcttgctctttcacctcagggagagcagcttgtcctttagtgtagagctctcctcaccttccttttgaccgtggcggtatgtccggtagtgatttgtttacacatctgtctctaacctagactgaggattggatccgtgtctgatttgctttttgaaaaattcattttaattaaatattgagtaggtattcataaagactataagaagacttataaaatatgtatgtatgtaaagagtaaccatgtgcgcacctggaggcttgacccgcctcgtaggaactcaagagcctcaggtgcgtcccaccctttaacgttgccatatcatgttgccatcaaaaaagtttagtcaggaaccagtcaagtgcccccacccccattcacaatgggaatctcggaatgtttgaaataagcttgttctttttgtgctgggctgaattcattaactctcctcagccgttgtccgtagtgtgaaggttgggtatgcccgtaagatcaaaaaaacaggtcaaaggacctagaaccaaggtcagtgtaaacaactgaaagagaggcaggcagaaagaaggaagcctgttgttagagtctatgtctccattgctaatctgtgagtctgttgctaagcaaactccttatgaaatgctcataactggacggcatcgctgactgattgggccccggcttcctgagctcgccaaaccattcacacatctttccgttcatttttgtgtgcccagtgactatccgctgtgtggagcaccgtgctgggccctggggtgcagcaaggagcaaaccagccacaggccttctaggtttgtgccagtttgtgccaggcccttagtatgcacagcgtttctaaggaaccagtaacttgtgatacaatgttgagttcaaagtcactttgagccagtcacaggttctatagttcacacctaatcttagtggggggcagagccaggagtttgaggccaaagtgggctacagaaatgaaactttcccagtgtctccacaagtcctgtggctgtcagcagccacccaaggaatacaggccacaaggaggccccaatgtgcctggtaccacgtcccttccagaatgacctgtctgtagagctgggtagacccacgaggtaaaagaaatgttcaggctaaaatccaatcccctgagttccttctttggaccaacttaagtttgtttctgctaatttatgtcttttccaatgtgaaagagggtgaacgcaaaaagccacatcgggttaagagcactggctgcttttccagaggacctggatttgagtcctagtacccacatggctgcttacacccggagatccagtgccctcttctggcctctgcgtgtactccctacaagtagtgcacaggcatacacatacaagcaaaacaccaacatgcagaaataaaaatgaagctcaaaagtgcagtcctagggctaagggtgtggctcagttggtagaatagttgcctaatgtatgcagagtcctggcacttataaattgggtatagtggtgcctacctgtaatcctggttctttagaagtagagccagggaatcagaaattcagggtcatttttagctacagagtgagtttaaggcaagcctgggctacatgagaccctctgtcaaacaaagaagtccacgcacattagatgcactgctagatcaccgactagaatctgctctttctcagcgtgtgaaagagggacagtcatgtccatctgccatatggcccgatgccaaggagcttgtcagggctggagcacagggtacagtaaatagcaactgtgacgctatcactgtgcaagagaaaggacagtgatgggacctggggtcactttggttggaagggacctatgtaagctaattctataagatgtgtctctaacaaccgttttaaatgtcatttcagtgttccccggagactggaccccaaagagcccctgggcagccagagaacaacttctccaaccccaaagcaagcatctgctactgctcctggccgagagagcccccgagagacaagggcccaaggcccatcaggccaggaggccgaaagtccccgcaggacgctgcaggtagacagcaggacacagagatcaggacggtccccctcggtgtcaccggacagaggcagcactcccacgtcaccctactctgtcccccagattgcccctcttcccagcagcaccctgtgtccaatatgcaagacctcggacctcacatcaacccccagccagccaaacttcaacacctgcacccagtgtcacaacaaggtctgcaaccaatgtgggttcaaccccaaccctcacctcacccaggtaaggacctcagtgccacctgtgtctgaccactgtctcagcatctctcctctgcttccttcccttccttctaccaacctcaatcagggctatctcccttccccaccagtgcccatgaatcctgatggggtggggagagtattggtggtggttccaggatgtggaatcagaggacaaggtctgaccccaggtctcctgagagattcctgtaccctaaaaacttagaaggggctggagcaaggactccacagttaagaacaccatctgttcttccagaggactggggtccagttcctagcacccacagagtggctcacaatcatctgtattccagtcccaggggctccaatgccctctccacccaggatgcacagagacatccatgcaggaaaacaaccatactcatacaaataaatacttttaacctggtggtgtggcacatggctttaaccctagcaatcaagaggcagaggcaggagaatcaggagttcaaggccagcctggtctatagagtgagttccaggacagccagggctacacagagaaaccctgtctcaaaaaaccaaaccaaaccaaataaaacaaaccaaccaatccacaaacttagaatctcagaatagaaattcaaaagaaactggtttaattacgccttggagagggcaaaagaaaaggacacgatcttccagtggctcctccagtagagatgaccatacactcctctgggcttggggctgaggggtgggaggatgggaggagaaggcaagcttccctagctatgggcctgcctctctccttgacagtcctgcagagagactctcataagaggaccagatttctaggaggacctgggaacgccttctagcaggggtctggacagctcctctctgggttcagttccagttgtctgggcgtctaaggtggtggactagtctgtcctccaattttgtggtagagaccaggcattcacaaggtatccacgtcctattctcccagcaagctatgctacaggacgatattcatgagtttagcctccttttgcccccaaagaactatggattcacatcgccatcgtagctttgttcaggatttctctgtgttggaggggttgcctaacagagcttttgggggctcccatgtgttagctaagggaaagccatacttttgaaatacaatgaatgggttttctggcatccttgtattcctacagggtgacccatagaagtctcatcttctccccacaaagactctgaattggacaggacaccgggtagcctctgcaggcagcactgggattctcggcagctggagttgtttggaccgtgtgggagggggataagtgagaatgactgttagcaggtcagggtctatatatgccagcatgaggtgctgtgggtgtgggacgtgtggtttgcgagaggtacgtgcgagatgccgaggcaggaggcgatgactcagtgcgtttggagctgctcctggaatgtgggggcttcctgaggaggcgtgcacgctcgtgattactgcatctgtgattagaaacagacccagccccgcgccgatcagttaagtaagtgttagctgttccatattgggaaaagtgtgatcaaaagaggggaagctcacctgtttgatcctaccgcctgagaagccacaagctcctggcctcccgggagcaggaagacttggtggatggcccatgtttctgtgggatggcccctcatcgtgaaccccctgggttcccaactccatgagatgctctcttgtgctgcagccctaggtggggtgggtgagaagaaagaaccgcacgtggtgcgtatcccagcaccccttatgccacagccttagccacttcctccaagcccagaacctttagagagatgggaagggagccagcctttaactgtgcctagaaaaacagcagagtaggaggacctggagactctcagtccatctgcctcgttgtgctgggcggaagctggggctcagggccagaaggaaagagggcctcaaacttactgcaaattgtcagtatttggtggagaacaaacctcttggccaaatacttcaaaccaatgctgggctggatgagtcaagtggtcctttagcacaagcttttggcatccttggggcatccagggctctaagacagtgatgaaagttggcagcctctcccaggcttgcttctacagagcatgggtggagctgccagtccgcaactccccactggaaaaatgctgtcttactctgttccacaggcccatgcccagcgacggtctattctgctggggcctccagatgagatctttgctttcttggagctggatttcaggggtattcctgtcaaggaaagcttaaccttggcacagtttcctgaggagcggcaaagcacaatggtcacattggtgtcattgtcctctgtcacatgctgaaagcagagccacctcctgggtcataccttgatgtgaagaggagacaactctgcaggctttgctcgcccatctgtttcatctttcctggaaaaccactcgtttgcatacctctaactcagtctaggctagtcactcctctggaaaaaggtcaagtctttttggatttttttttttttcagttcagggcaggtaaagaatttcacctgagggttggagagatggcttaacagttaagagtacttctgcttgacacaagagcagagggcctgggttgttccaagtacccacaaggcagctcacaaccatctataattccagttcctaggaaatctgatgccctcttctggccttcatgggtattgcgtatacatggtgcactgaagtgcttacaaggaaaaaatgtgaaataaaaataaaccttcagggctggtgagatggcttagtgagtaagagtactgactgctcttccaaaggtcctgagttcaaatcccagcaaccacatggtggctcacaaccatccataatgagatctgatgccctcttctggggtatctgaagacagctacagtgtacttacatatagtaaataaataaatgaaaaaaaataaaaaaaaaattaaaaaaaaaataaaccttcagcggggcgtggtggcgaagcctttaatcccagcactcgggaggcagaggcaggcagatttctgagttcgagaccagcctggtctacatagtgagttccaggacagccagggctacacagagaaaccctgtcttgaaaaaaattttttttaaattacaaagatttcacctgttaggaactctgccaaaagaccatgtagagggtttcattttggcatcagttctgtttttaccacacataagaaacccttgctctgatatcacattggcaaccagaggccagagacgctaacattcagagccggggatgggaaatggggaagtgcttctccttgtcttctcttctctctttctttctcttcttcttcttcttcttcttcttcttcttcttcttcttcttcttcttcttcttcttcttcttcttcttcttcttcttctccttcttctccttctccttctccttctccttctccttctccttttccttcttctcctcctcctccttcttctcctccttctcctcctcttcctcctcctctgttcttctcctaccaggggtgtgagggctgctagcccaaacccagacagggtttctctgttttaccctggctggcccagagatagattcacttcaaactccacttgagaaaattaccaggctgatgagatggctcagcaggtaaagccacttgatgccaagcctgacaacttgagttcagcccccaggagctgcatggaggaagggcagaaattgttctttgatctccaaacacaagccatgacaacacacacacaaagacaccacagagacagacacacacatagacacacataaacacacataaacacacacagacacacacaaacacacacagacagacacaaatacagacacagacatacagacagacacacagacagacacacagacagatacacatacagacacacatacatacacacacacatacacacagagagacagacaaacacacagacacagacagacacacagacacacataaagacacacacagacacatacagacacacatagacagacacacacatatacacatacacacagacacatgcatacacacacacacacacacacacacacacacagacacatagacagacacacatacacacagacacacacacacacagagtaaacaaagaaaactgtttgaaaatgtaaataaaacactagaggaaagagtatggtcaggaccttatctactccaggcttagccgttgctgaggcagaggcagaggcagaggcagagaggcagagaggcagagaggcagagaggcagagaggcagagaggcagagaggcagagaggcagagaggcagagaggcagagaggcagagaggcagagaggcagagagagaggcagagagagaggcagagagagaggcagagagagaggcagagagagaggcagagaggcagagagagaggcagagaggcagagaggcagagaggcagagaggcagagaggcagagaggcagagaggcagagaggcagagaggcagagaggcagagaggcagagaggcagagaggcagagaggcagagaggcagagaggcagagaggcagagaggcagagagggacagagaggggcagagaggggcagagaggggcagagaggggcagagaggggcatagaggggcagagaggggcagagaggggcagagaggggcagagaggggcagagaggggcagagagaggcagagagaggcagagagaggcagagagaggcagagagaggcagagagagaggcagagaggcagagaggcagaggcagagaggcagaggcagaggcagagaggcagaggcagagaggcagaggcagagaggcagaggcagagaggcagaggcagaggcagaggcagaggcagaggcagaggcagaggcagagtgcagaggcagaggcagaggcagaggcagaggcagaggcagaggcagaggcagaggcagagaggcagaggcagagaggcagaggcagagaggcagaggcagaggcagaggcagaggcaggcaggcaggtctaacttactgcccccatccttaacctcatgacaagccctgggcttggatgcttaccgaaggtgggttgtgcaaagaaggaagggagccaatgtaatggtctaagcctctccctttaatgtctgcatcccactgcttccagcaaaggccaggacaccagatggcctgggggtggagctatgagcagcacagagtcctcagccctagccagcagcctgtcccctttcctctgccccatccaggccacactgctgtttgggccagattcaaatgaggcacaggtgtcctaaaggcatgggatgaggcctcctccaggaggagatgactacagtgcttccctctaaccctaaataaagtggaagtggacctccaggcaggctggggcaggaaagggatcttagccaccatgtgcctagtccttaggccatttgccttatagaagcccccctgattaaaaaataacagcaacagcaaaaccattcagtcaacaggggaaagtcctccaagcttctaggagctcttaggcagccagccctggtgttagaacgcggccccaggctgcctgttttctggagacagggccgaccttaactgtatctgtaggatggagagcagagacacgggagagacaagagtgctgttgcatgggctgttttgtggctgaggccatcaggcatggagtgctggcactgaagagcctaggcatcaaccaaacaggaatgggaaggatccagagcagaacaatgcagctcaccactaaatcgtatattgtttttttttttaaagatttatttatttatttattatattgtaaagtacactgtagctgtcttcagacgcaccagaagagggcatcggatctcattacgggtggttgtgagccaccatgtggttgctgggatttgaacttccgaccttcggaagagcagtcgggtgctcttacccactgagccatctcaccagccctaaatcgtatattgttatatgtaaagccaagtgaaacaggacagagacagtggagtaaagacggccaagaaaaggggggatgagatggctcagtgggtaaagttacttgctgccaaacctgatggaccgagttcaactcccaggacctacagggtagaagaaaactggttcttgcaaaagctgtgatacatgcccacacaggcacacacagaccctcaagtagtcagagcaaacttgccaaaaaaaaaaaaaaaaaaaaaaaaaaaaaaccacacacacacacaaccaagttggaggggactggagtgatggctttgtggttaagagcacttgctgctcttccagaggaccagggttcagttctcagtactgggattgggtggcatagctgcctgtaactccagctcctggagattcgatgccctcttctgctctccacaagtactgtgcatgtgcacacacacataagagtaaataaaaaaaatttcaaacaagaaaaagtgagatcctgactcaaaaaggtaaataaacacaaaatcaagctaggcacaggatgctcatctttaatcccaccagtctccaggcagaggcaagcagatttctcagttcaagaccagcctggtctacaaagttagtgccaggacagccagcgctaccacagagagaaaccctatgtaaaaagagaaaaggaaaggaaaggaaagaaagaaaggaaaagaaaaaacaaaatcagaacaacaacaaaacccccaaatctcccaaatttcacatatacatttacatgattattatgtctgtctgtctgtctgcctctgtctctctgtgtgtgtgtgtgtgtgtgtgtgtgtgtgtgtgtgtgtgtttctgggattcaacccagggcctaggtagtagatactaagtattttgctaattagttacactccaagctcaagataaaatgatctttgtcaagaagtacaagaactttgaatggagaaagccaaatgatgctgggaaggttgggtctccacaagcagtagaataaagctggacccttacagcagccatacataacccttaacccagagtgagcgagacacttacatatacaaggtgacgctggaaagctcttaagaagaaatacaggacaagcccttccaactttggacttgcctgtggtttcttatcttagacaccaaaggcacagtcaatagagagaaagacagatcagactggatgaaaatttaagatgtttgagagaaggctggagagatgggtcagtggttaagactgctcttccgaaggtcctgatttcaattcccagcaaccacatggcggctcacaaccatctgtaacgagatctgatgccctcttctggagtgtctgaagacagctacaatgtactttacatataataaataaataaatctttaaaaaaaaaaaaaaggaaaagatgtttgagagaaaataattgccagacttatacctagtaagtagttgatatatccagaatatacaagcaaaccctacaatccaactaaaagacactaggagagcagtggaggagctcagctctgtgacagtagcgtgtccttctcaatactgcatcatgggaaaatataaacccacaggaaagttgaaagaattgtataaggaaaactctcagatctgttacctgaatctttaattagcctgtgactctcctggggttttgttgggggggtgggaggttgttttgttggttttgtctggtttggtttggtttggtttggtttggtttggtttggtttggtttggcttggcttggcttggcttggctttttggctatttgagtcaggatctcactatgtagtcctgactgtcctggaaccactctgtagaccaggctgatatctgcctacctctgcctcccagtgctgggattaaagacatacaccaccgtgcatggttttctcataactttatcatatctctgtccttctgtcttcctgtccatccctctgtctggtcatctgtccattcatctaatttctttgttggttttcaaagtgtggtgcagatacagtggacttcacaccgaccactgcagcaggcgtatcaccgttaagtaggattcagtatttactgtaggttattttaggtaaaatctacatatgatgacatttacagagtttaagtgtaccattcagtgagctttggagagctgggtcaagcccatggggactgtggatcttctgcggtaacagtgaaagtcaggtcagtggtgtctggggggcaggaggcaaggacttacgataaggaagggccaagatgacgacacctggaaaccaacaaaattcaagaggagagactggagccaggagatgaactccaacgctcctggggatttacaaaagagaagcttaggcaagttcaagcagtgcagcctctctgggactgagaggagtgcgtggagagagggaagagacctaagatcagctagggtgggaagggagactttcagagccttctcagagttctaggctagtgagaccttccagcctcaggcaatgactccattctccaccatcacagacagaccctgagatttggggcacactcctggaaccctcctcagatctctgggttggcacaggccccttctgcgggtcatgtctgactgggtcatatgttcttccccgttgtgttctgaggtaccctctgtataggctgagatcacagcagactggcgaagcacaaagaatggtggatgggcagcagagggtgttggatgaggcaggtggtcgccattgctatgtgaatgtctaggccagctcagacactggcctctccttgatcacaggggttatgggagtgctgtccctcctaatgagacctgaccagtgactcacagcccagaaaggcctggagtcctactggcatggggtcatcccagggacctctggctttggtagcagcaggggagtcacatttataagccacttctgtgatgtttaaaatggaaagcacaaattcagtacgaggcatgatgtcagtgccgagtgatccagcactgaatgctactctccagcaagggctcggaggcaggtggctctccacaggaaggtgagctaagtgatggagatctgaagccctgttctctgctacagagcctagcggagggaagtggccagagaacctgcttcatctggggcccttagagctttctggcagcctttttccctgggagcaccctgtgaggccaggtgtgtcaaatacgcctggaccctacctgagactgatagacgctggtaggtcatgggtcactgaggtccttgtcaggagtgatcgtgttaaagctcttctcagggaagatgtctccttcccttgctgcccccaggaaccagtaaaggagcagccgggagtggctgctgcaaacagatcactcggaaccttctcattcaactcagggtccacagaacctgctgcctggtcttgggaggctacttagttactctgcacactgaacagtttgaataaaggaacagatgggagactcttcttccagatgaagccctcttggagccagggagcacatggagccatgcctctgcagatcccagcatgctcctggtggagtgggcaagctgtggaaagtcacatacatgcctgcagcctctgctgccacactcccaaactaccttgaccctgcgtaccactctgagccttcttcctctttatcgtcttcagtcaacactgggctggggcttggggagttcgtggaagagcctgccaaccttctgagatggtggggcgggcttccctgctggaaggaagtgtcaggttgatgaaagttgatgtcatccacctcacggcagcccaggaaggcacctccagctctgcttttggctctaagagcgtgaggcaggcgatgtgcacatctcttgggcaagtgtctggtcaggacagcaggaccctaagggctttcttgtcatgctagcagaagaattagtccttctaattctggtggacagcttagagggtacctaagagtcacaggcgtctcctgggctcagcttcctgatgaggagtcacgatatgcagctaaggaaggctgcagttgccactggtcttgaggccagagtgtctcccacagcattgtacctgtgtaccctggtggacaggtgggtggggtgcacagctgtcatctctgtcatggtagggaccttggagaaaggagaagaggctaggacaggcctttcccagcaaacccctgggaggtagaaaagaaagtcttagcaagttacagagaaccccgtctgccagggtcctcctcgaaaggcctcaggaacaaggtcctatctgcctaagcctgagcccgggagggactgggggaggacacggtcaaggctcctcgccgccgtctggaaaaggctggatagaaatagctgcgcccatctggcagatgagtcactgaggtttcagccatttcttgaagaggttctattttaggtgagatgcctgcagcacagccttggtgatcggggctgaggaaagggaggcgctggtgctggtacagggtttgggttgggtttggtttggtttggtttggttttaaacaattgcctctgtttagctctgtccagacccgaggaggggggtcaccctgaagtcccaaaccagggaagttacctcctagatcccaggaagtcttactgtaggttcacaacaggacggggacattgggcgtggcctgagaacaggccctggtgagaacataaatccccctgtggagtccctcatcagaggcgcagaagcctcactttgataagcccctccccacctaaaatgaactttctaggaagacaccagggactgacagtttttcctatggctttctccgtccagggtgagcaaagccacactggattttcaagagcacagagtggttaacagttcccagctggggctgcgctgcctccgcctcacttttcttagattctggagccgggtttggtcttctggggaggtggatgttgtagtccctgcagggatggattctagactctgaacttggcctctacaatgttgagtggccatcagagacgtgagactggcagtcactgggctccaggctgcccggcccagggaatcaggagttaaatggggctgccagtgttgctcttgtctgtagctatagtttctgccctggtgaccacaagagcacactgctaaccatttcagaccctgtttcgtctgctgtgaggataaatacctctgaacacgccctccagggtgcttggcacaggggggtgctcaccacaatacgatattttccccacctttgggtgctgctcttgggctgccgggacaggatgcctgagctccggctcctcactgacaagccaccccacaactacagagacccactgcagccttggagacctcgtgagctttgagaatcactcggtacagcaggaggcccggtgtgtcagggatgagacaaccaagggaagatgatagggaaagaagccaggtagaaggcaaggctggggtggctagtgaggtcgtggggaagggcttccttactacgctggggagccctcagaggggtgtgagtctgtgggcgatgtgctctgatttacatgtggtttcatttggcaagaaaaggtagtatctacttatgagactggaagtccaaaacaaaagtctattctgctaatcttttagtacacaggtgacatggaagactcagacctggcctgtggcatgaccacacgtccatccctgtacaggttcatgccaaaggggagctacaagtctgtaacatgaacatcaactaggataatgattgacccattattgtgccattttccttgtcttgtggttggaggcgtggcactcacctaacatgcatgaggccctgggtttgaccaaggacaccataaaacaagcaatagcagaacctctgagttcaaagagaattcaaagtcttaaatcagtcacgtctcgtctgtgtttctcgctgactctgccctggagaattttccttctgtatctgtcccttccgtgagaatacaagagcttccaggacaggagtcataccatggcttctttttatttcttctgctttcctctctcacgtgtcaatcttcacttgtaattatgcatggtgtttgtgtacgtgcacgtgcgagcaagtgtgggtctgtctgtctgtcgaccgtgcaggtaatgacttcgggaaccttccatccctgcagcagcctgagccctgtgcactctgaccccgaccaccctgctgactgctgtttcctcccacaggtgaaggagtggctctgtttgaactgtcagatgcagagggccctaggaatggacatgaccactgcgcctcggtccaagagccagcagcagctacactccccggccctgtctcctgcccactccccagccaaacagcctctggggaagccagagcaagagcgatctcctcggggcccaggggccacacagtctggtccccgccaggctgaagcagccagggccacctcagtgcctgggcctacccaggcaactgcccctccagaggtgggaagggtgtctcctcagccccctctctccaccaagccttccacagctgagcccaggccacctgcaggagaggcccagggcaaaagtgccaccacagtgccctctgggcttggtgctggtgaacagacccaggaaggcctcaccgggaagctcttcggccttggagcatcactgctgacccaggcgagcacccttatgtctgtgcagccagaggctgacacccagggccagccttccccaagcaaggggcaacccaagattgtcttcagtgatgccagcaaggaggcgggtccaagacccccaggctcagggcctgggcctgggccaacacctggagccaaaaccgagcctggggctagaatgggtcctggatcagggcctggagccctggcaaaaactggaggaaccgccagtccaaagcacggcagagcagaacaccaggcagcatccaaggctgctgccaagccaaagaccatgccgaaggaaagggcctccgcctgcccactgtgccaagccgagctcaacatgggtagcaggggcccagccaactacaacacctgcactgcctgcaagctccaggtgtgcaacctgtgtggctttaacccaacaccgcatctggtggaggtaagagggcgagtgggagggcagtgcggcaaacatgtttctttgaactttgttgaggacgcagggaatgcagggaaaggagggacaagggagccaggacaggtactgagagcctggagtcagagggccacgttacagcatatgctacagacaggtcataatctgcttcctgcctcctactcagaactgtcacagtaggtggggtaatggtcactactggttctcaccagctggccagagctgtgaggcccagtccctggattaggaggtcttaactgacatcccatttccagcgccttgatgaacgccaccaacctcatcctgatgtcccatccttctctgggtctatgattctcacataagtaggaagtgaaggcccacgtgtcagaaggctaggtccaacgccctggggactaaggtcttctcacagtgacatagggcccatgtgtcagaaggctaggtccaacgccctggggactaaggtcttctcacagtgacatagggcccatgtgtcagaaggctaggtccaacgccctggggactaaggtcttctcacagtgacatagggcccatgtgtcagaaggctaggtccaaagccctgggggctgaggtttctcacagtgagataggctccaagcccaccagctggtgtctggtttcagccctctctcttaaggtcatgagtgtacatgttaacttgtcaaagtcctggcctttcctccacgttttcccctgggtaggcttgagctctcccaggggataggatgctcagaaatgctacccgccccccatcccccataggaaagctgaaggaaagctagggtcaaagatactctttgctctgttcctgctccaggaatgtggactgggacctgagcagagccaagtagaagggagagagaggcctggtgtgaggccagtgtgcttgtcaaaccaggagtccccgaaaggcctgaaagatagaggtacccaggcagagctggactaccctgggccttgtgactgtgtctgctcatgctccaatcccgttacttccttctctggcccaggaccagtcatgtgactttaccatggctacctttggcatgtctaagcatgatctgatgggctcatcatagccagaggatgtatgtggtgtcagattattgggccaaggacccttcatgcggcagccactaagccatgtgtgatgttcagttgagtcaagcatagctgatgggacaggggacacaagccaccactagcccaaggtgggacaaaagggagaaagaacatggagtcaccactgtgtctatgccaccttcttctgacttccttggcaaaggtctccttaagaaccaaacctaggggaacgccagggccaaaaagggggagtgggtgggtaggggattggaggggtgggtatgggggacttttgggatagcattggaaatgtaaacgaggaaaatacctaataccaaaaaaaaaaaaaaaaaaaaaaaaaaagaaccaagcctagtatgactaaggaaatcacttgaccaccacaggaggagtagccctgagtgagatgaatggcctctttatgtgaaacccatgtggccttttaagcccaacactactccctgtccaagctgtagagtcagtagctcattggaggacatttggcccagccagtagtgggggggaaaggggtctacagagcctgttttcccgacacctgtagatgtaagctcactgctggtcagatggggtgcgctgacaccgaaggaccatgagccctggtggacttgagttaacctagtttggaagccccgtacccccaagagacatctcaggccatttccccattaagcaggatatacatagagggaaagacattgtttatccaggggcataaatgttcctgacagcttcctgtggcagcctctggggcaggccacacgaaacgctgaatcagcccaaacaaaagtgtcccagtcacgtggtgactcgaggtgacccatatgaattctaatctaggctcgtctttaccggctggattctagcttccctggactctggaccacctgcctctcagcaggcagcatcccgacccccacgccctgctgacttatgcttacctcaggactatctccttcgccagttcagtccttgcctccacagtcctcatccagagggtccatggtcctgaacacatggctgatgggggtactagcccaagctcttcccaaagtcagatcacccacctttctgcttttaacactagtcaagaagggtacaccctgccaggcagtggtggctcatgccttaaatttcagcacttgggacccagaggcaggccgatctctgagtttggggccagcctagtttacagagtgagtttcaggacagccaggactacacagagaagccctgtctcgaaaaagaccaaaaagaagaagaaggaggaggaggaggaggaggnnnnnnnnnnnnnnnnnnnnnnnnnnnnnnnnnnnnnnnnnnnnnnnnnnnnnnnnnnnnnnnnnnnnnnnnnnnnnnnnnnnnnnnnnnnnnnnnnnnnnnnnnnnnnnnnnnnnnnnnnnnnnnnnnnnnnnnnnnnnnnnnnnnnnnnnnnnnnnnnnnnnnnnnnnnnnnnnnnnnnnnnnnnnnnnnnnnnnnnnnnnnnnnnnnnnnnnnnnnnnnnnnnnnnnnnnnnnnnnnnnnnnnnnnnnnnnnnnnnnnnnnnnnnnnnnnnnnnnnnnnnnnnnnnnnnnnnnnnnnnnnnnnnnnnnnnnnnnnnnnnnnnnaagaagaaaagaggggtacaccccaccccaccccctttctttcaacagctctgttgaagctgctgtcctcaggagggctatggctgctctgaggaaggtgtggaccagtaaccatgatgccccttcctgtggaggtcttactgttatccatcatcaagaatccaagccagcagcccagagtcctttcagctcagcatccactccacagaccaagcacccatagccccacacccagattcacaagaatctggcctctgctctccacccagtggccagagccctagaccccatcccctgccccaccctctgcttccttttccttccagccacaaaataaccactcatttattaaaactccctgcaggttcacctgccttgcagcttatgtatggctggtggggaggagctgttgcatggtgtgaccccatccccgccacacacaccccagcattgcttcacccaggtcttaactaggccacagcattctttgctctcacctcagcaagtggtcacttgctgttctgagcaactttgtgcttccccgtgacctatttttcacttcttggttagagttgtgtcacaggtgctaagagattcgccctaagtgaggtatagaggccacacgctggtccctctccaggtcagaggggttgatctgctgggctcaggccagttgaaggctcagcatgactgagccgtgtctctacgtggggtaaggcagacctctgtagccatgtacaagaggaagagactcacagccccctatgtgtctagtagacctattggggtttacctgaggccagaccaacaggctggccattttcctcaatgtgtgcagctagaaaaagctttcccttctttctagatagagtccagagaataccacataagaatcactatagttggaccaacttttacttgaaacttcctctgaagaatactgtttaatgagtcatttcataattaaaagggctgattccaacatttttaacctattcatcttttagaaagataatagtacctttctgggccactttctaattgacttgcagttcaacggtgcgaagaaattagtggaattgttacagtaatatcaccagtttcttgttatcagtgccaaaaattcagctgtgcccttgaaatgccaggtttccctgggcaaacggccttgcccctgtgacatgcagggctggactgggcttgtgaacagaggctacagggtgggcactgggcccaaggcaaacagctggctcctgcttcaccccaggctgcctctggggtggcaaatcagactcctatctcttcccatgtgggatggaaacagtaattcttttaggtgtccatatgagctgctagcagtacctggggtctgtatgtaagtccttacaacagccaatcctccagtcggaacactggacccaaggtattccctgaggggaggactcctcaccgtaaacactgtggccaggataggctcggggatcccggaggagaactgcatggggaatgaacatgcttggggctagggcatgagaggggcacatctcagcttccagggagcacactgcacacactgggtaaggcttccttctaggaggcagaaaggaggagcttgggtatacccagggccatggggtggaatggacattacacaatcgtaaaagtccagcagcgctgagactggccgtgcctgtggcccagtgtctgagtctttaccttttgggtttcttttgtgggtgtttgtttgtttgtttgtttatttattttgagggaggtatttggttctgtgagacagaatctctctttttagccaaggctggcctcaaactcatggcaactctcttgggtcagcctctcaaaattataggcctgagccactgtactgagctgccctgtggtccagcggcgtggaaagccaggtagctggccatgaggtgtagatcaggatgggccacaagagctggcacacaggcagctccacaaactcagagaacaggcctgtggcctcctttagacagtgtcaggatgcccagcatcccacacaaccccacacagtctcccagtcctcactggccggtgactcagagaccacagttctcacatgctttggggtttccccatacttcaccccccacacacactttacttccttccccttgtgtgtggattggaagctctaatgatcatctttggtttccatgagaaccgggtgtgatgctgtgctcggacacttgtgcagaaatgccgccttgaaccactgagctcctcggtacacgcctttacatctcccaactggagctgatgattgttcttgggagatctgtatcttcctgtccccaaaaggactaacaaggcagaggtggtcatcagtctccccgttgtccattctctggctgctcaccaaagagccaagcaaaaaggacagccagccagccaacctccctctgctggggctgggcagggcttagcaagggagacagtcatattctgagtgggtgaatgaatgaagtaaggagataagactcaagggagagaatgaatgggtggacgatccagaaacggaaggatcaggggtggaggtgggggcacattggggtggggctgagatggaggtagattgaatgaatgagttgatacctcaacagctgtgctcagactcctaggtgtgggcgttgcacatggcctgcctttcacccatacccaggaggaggctttggccagtcctctgcccagctcctcccagcctccgtgcttgtacactgctcctgctcccagtgggctgtgaagggcctccagcaggcgggtcaagtgcttatttttagctcttccttcacacaccgccttctgccccgcacccccccccccccgcccgccctttctcactgcttacaaagcagagccaggagcaagagagccaccaggaagctttcctgaaacccggctgcctccatgaatatacctgtgaaggagcaaagtcccagccagcctgtgaccactggcagcatgcctactaaaggccttacttgtgggtacagataagcaggcctctgcaggggctagccccggacacgggctctgcctttgtccatgctgcccttccagggtaccctcactgtcttttagattgctgcttctggagtgggttcaacagaccagaggtggttcagaggtgtgtctgaggcagcaaaagtaacaggacaccattttttcctatgccttggctctttctcaagacataatggtctttctcatggtactgctcctgggaggagcccatgtctaggcactgtgacaagggcaagtgtgcactgagcagttagtagggtgctgttctgggctgggctaggctgttaccctcattcccattacctcatgtagccaaagcaacatattcctgtccagctagacctactgtgggtctagaacccctgactcagggaccagagatgtccaagtcccagccatgtgcagtcagctgggatttgaagaattggtttctagcagtcttaggacttcctgctgattcctttgacatatttatcatggcttgtttagggctgtgggttccaggaagggcttctatcagtcacttctcattgcagtgaccaaattgcagatagaaggaacttaaaggaggcgaggtttgttttgactgccactttagaggggaccatggtagccgaggtggcactgattgtggcaatggaggcttagggcacagctcattcacatcttaccagatcaggaagcagagaatttgatccggaaccagaagtaggtatcaccttcaaagaccttcccttagcaacccattacagctccttagaatctatgtccaaaggttccaccacctcccaagcagcactagcagcttcggaccaagtattcagacacacaggcctttgttttgtaggaacagttcacattcagactatagcagtgctggtccctgtgtgtcatcgccatcatgaccctgtcttcagcctttagccctggtcctgaaactgagtgatttttaagagtggtggctaataataatgataaatagtgatgcggggcagtggcggtgcacacttttaagcctagcacttgggaggtagaggcaggtgtatttctgagtttgaggacagcgtggtctacagagtgagttccaggacagccagggctacacagagaaactcttgtctcgaaaaaccaaaccaaaccaaaccaaaccaaaccaaaccaacaaacaaaacaccaaacagtgatgccaccccagttctggaaggaactgggctctaggcgcacagttctccatcagagggaaagtccagagccctggccacaggaggagtcctttctgtggtgttctttcctagccctagacagggagacttggctgaaagtgtgagcaaagacttctcagtgctacccagttagtctttgtggcaatggaggcttggggcacagctcattcacatcttaccagatcaggaagcagagaatttgatccggaaccagaagtaggtatcaccttcaaagaccttcccttagcaacccattacagctccttagaatctatgtccaacttctgtattagtcagggttctctagagtcgcagaacttatggacagtctctagatagtaaaggaatttattgatgacttacagtcggcagcccaattcccaacaatggttcagtcgcagctgtgaatggaagtccaaggatctatcagttactcagtctcacacagcaagcaggcgaaggatcaagagcttggagtttgcccaagctgagcataggccttacttggggaaggaaatggcagggtactatcagaccccagaactaggagccagggccagggccagggcctctaggatattttacatattctctctctctctctctctctctctctctctgaatgcattcgtgttttgcaggacttctccccatacagcccctgaattgtaattcagtccttggggttggggccctggcttccccctgtgtttcatcccaagcctctgtaatttttctggtctcctctccctcttaattatcttccttttctggcccagtgaaaatttctctatgggttaagaagaaaactttcttcttacctttgcatttgcattttgattttgtatatgtccctgagaagtttataatttgggagcaatatacctgtcagtttttttctctttatgcctttggtatcctgttctgaaagactttctcaggctggggatggctcagcgctacagtatgtgtctacatggtgcagggctcgctctgggttccatctaccaagagtgaggtctgactcctccctaaggttagggagaatgatggaaatactctctgcttgctcctgggtctgtggtttttcacgaacctccctcctgtttccttacagaaaacagagtggctctgtctgaactgccaaactaagcggctgctggagggcagcttgggggagccagcccccctgcctctgcccaccccacagcagcctcctgcaggagtccctcaccgagcagctggagcagcccctctgaagcagaaagggccacaggggctgggccagccctcaggctccctgcctgccaaggccagcccccaggccaccaaggccagccctcaggccaccaaggccagccctcaggccaccaaggccagccctcagaccaccaaggccagccctcaggccaagcctctcagggctactgaacccagcaagacctctagcagcgcccaggaaaagaagacagtgacctctgctaaagctgagcctgtgccgaagccacctccagagactactgtgcctcctgggactcctaaagcaaaaagtggggtgaagaggactgaccctgccaccccagttgtcaagcctgttccagaagctcccaagggtggggaggctgaggtcagttctatttcattaccaagggtcctagctttcaggtgagatagtctgaggaagggctaacaatgtaggcctaagacagatctattggggtcacagagacaccctagttgaaagagggtctagattaagtttcagtagatcactgggatgatggcacactcctttagtcccaacactttggaggcagaggcagtcagatctttgtgagttcaaggctagcctagtctacctggtgagttctaggacagccaaggctctgtagagagaccctgtcacaaaacaacaacaacaaacaacaaatgaagttcagctggtctggagtctgtgggatggagacacgtcctgtgtctgccactttgctggtctcccacacattcatctagtaaagtttctcttgctgtgaagtctgtaagttatgtggggccagagagatagcccctagggtgtggagggccccttcccgtggtccttgggattgacaggagatcaggagtaaatgcctgctttttaccctatgcaggaaccagtccccaagccttattctcaggacctgtctcgaagcccacagagcctcagtgacacaggctactcctccgacggtgtctccagctcccagagcgagatcacaggtgttgtacagcaagaagtggaacagcttgacagtgcaggggtgacaggcccacgtccacccagcccctcggagctccacaaagtgggtagtagcttgcgcccttcactggaggcccaggctgtagctcccagtgcggaatggagcaagccaccccgcagcagcagcagtgcggttgaagaccagaaacggcgtcctcactccctgtccatcacgcccgaggccttcgactcggatgaggaactgggggacattctagaggaggacgactccttggcatggggacgtcagagggaacagcaggacacagctgagtcttcagatgactttggcagccagctgaggcatgactacgtggaagacagcagcgaaggcggcttgtctcccctcccacctcagcccccagcccgggcagacatgactgatgaagaattcatgcggcgacagatcctagaaatgagtgccgaggaagacaacttggaggaagacgacactgctgtctctggacgaggcctggccaaacacagcgcccagaaggcaagtgccaggcccagaccggaatctagccaagaacccaagaggcgccttccccataatgccaccacaggctacgaggaactcctatctgaggcaggcccagcagagcccacggatagcagcggagcccttcagggaggtctccgacgttttaaaaccatcgagctcaacagcacgggtagctatggtcatgagctagaccttggccaaggtcctgatcccaacctggaccgggagcctgagctggagatggagagcctcacaggctcacccgaagaccgctctcgtggggagcactcctctacgttgccggcctccacacctagctatacatctggcacctcacccacctccctgtcttcactggaggaggacagtgacagcagccccagccgccggcagcgcctagaagaagcaaagcagcagcgcaaggcgcggcaccgctcccacgggcccctgctgcccaccatcgaggactcctccgaggaggaggagctgcgggaagaagaggagctgctgcgtgagcaggagaagatgcgggaggtggaacagcagcgaattcgaagcacagcccgcaagacccggcgtgacaaggaagagcttcgagctcagcggcggcgtgaacgctccaagacaccacccagtaacctgtcacccattgaagatgcgtcccctacagaggagctgaggcaggcagcggagatggaggagctacaccgctcttcctgctctgagtactccccctccccctccctggactcagaggcggagaccctagatggcggccccactcggctctacaagtctggcagcgagtacaacctgccggcctttatgtctctctactcaccgactgagaccccttcgggcagttccaccacgcccagttctggacggccccttaagagtgcggaggaggcctacgaggacatgatgagaaaagctgagatgctccagagacagcagggccaggtggcaggggcccggggaccccatggtggcccctctcagcccacgggcccccgcagccagggctcctttgaatatcaagacacccaagaccatgactatggcggcagggcttctcagccggtggcagaaagcacgcccgcaggccttggagcggccgtgtacgaggagatccttcagacatcccagagcatagcccggatgcggcaggcctcctcgcgggatctgggcttcactgaggacaaaaagaaggagaagcagtttctgaatgccgagagcgcatacatggacccaatgaagcaaaatggtggcccacttacccctgggaccagccccacccagcttgctgcccccgtgtctttttccacctccacctcctcagacagcagcggtggccgagttatccccgatgtccgagtcactcagcattttgcaaaagagcctcaggatcctctcaagctgcacagctctcctgtctcctccactttgacctctaaggaggtaggcatgaccttctcccagggtcctgggtcaccagccaccacagccagtccgacacgagggtatatgactccaacctccccagctggctctgagcgtagcccatcaacgtcttccacaatccacagctatgggcagcccccaaccactgctaactatgggtctcaaacggaggagctgccccacgctcccagtggccctcctggaagtggacgggcccccagagagaagcctctgagtgggggtgacagtgaggtcggtgccccccagccttctcggggatattcttactttacgggctctagcccacctctctctccatctaccccctctgagagccccacattctcaccaggcaagctgggccccagggccacagcagagttctctacacagacgccaagcctaacgctttcctctgacattccgaggagccccggccccccctcccccatggtagcccaaggcacacagactccacaccgacctagcactcctcgattggtgtggcagcagtcttcccaggaggcccctattatggtcatcactctggcgtcggatgcttcgagccagaccagaatggtgcatgccagtgcctcgacttcccctctgtgctcacctacagactctcagcccacctcccacagctacagccagacaacacctccaagtgcatctcaaatgccctcggaaccggctgggccacctggctttccacgagcacccagtgctggtacagacggacccctggcactgtacggctggggtgccctccctgctgaaaacatctcgctatgccggatctcctctgtccctggaacatctagagttgagccaggcccccggcccccgggcactgcggtggtagacctccgcacagccgtcaagcccacccccattatccttaccgaccagggtatggatctgacctctcttgctgtggaagcaaggaagtatggcctggccctggatccagtctcaggacgccagtcaaccgctgtgcagcctttggttatcaacctcaatgcccaagagcagacccataccttcctggccactgccaccacggtgagcatcacaatggcctcatctgtgctcatggctcagcaaaagcagccagtggtatacggagatcctttccagagccgcctcgactttggccagggttcaggtagccccgtgtgcctggcgcaggtcaagcaagtagagcaggctgtccagacagccccgtaccgaggtgggcccaggggaagacccagggaggctaagtttgccaggtataaccttcccaaccaagtaacacctctggccagaagggacattctgatcacccagatgggcaccgcccagggtgtgggcctgaagccaggaccagtgccagagcccggtgctgaaccccaccgggctactcctgcagagctccggtcacatgctcctccaggtaccaggaagccacacacagtggtggtacagatgggagagggcacagccggcacagtgactaccctgctcccagaagagccggcaggtgccctggacctcaccggaatgaggcccgagagccagctggcatgctgtgacatggtctacaagtttccttttggcagtagctgcactggcaccttccatcctgcccctagcgcacccgacaagagtgtgaccgatacagccctgcctggccaaagcagtggccccttctacagtcccagagaccctgagccccctgagcccctcaccttccgcacacagggggtagtaggacctgggccccatgaagaacagaggccctacccacagggcctgcctggaaggctatactcctccatgtctgacaccaatttggccgaagctggcctcaactaccatgcccagaggcttgggcagctcttccagggacctgggagggactcggcagtggacctcagctcactgaagcactcgtacagcttaggctttgctgatggacgctacttagggcagggcttacagtatggctccttcacggacctgcgtcaccccacagaccttttgtctcacccacttcccctgcggcgctatagctcggtgtcaaacatctattcagatcataggtacggcccacggggagatgcagttggcttccaggaggccagcctggcccagtacagtgccaccacagcccgagagatcagccgcatgtgtgctgccctcaactccatggaccagtacggtgggcggcatggcagcgggagtggtgggcctgaccttgtgcagtatcagccccagcatgggcctggcctcagtgctccacagggtctggctccccttagatccggcctccttggcaaccccacctacccagaagggcagccaagccctggaaaccttgctcagtatgggcctgcagcaagccaagcaacagcagtcagacagctactcccgtccacagcaacagtgcgcgcagccgatggcatgatctattcgactatcaataccccaattgctgcaacgctgcccatcaccacccagcctgcctcggtactgcggcccatggtgcgtggtggcatgtacaggccttatgtatctggtggagtcacagctgtgccccttaccagcctgacccgtgtgcccatgattgctcctcgggtacctcttggaccagcagggctataccgctatcctgcaccaagattccccattgcttccagcgttccacctgctgaaggacctgtctatttggggaagcctgctgcagccaaggcctcgggggcaggaggtccgccaaggcctgagctaccagcaggggttgctcgtgaagaacccttttccacaactgcccctgctgtcatcaaggaagcccccgtggcccctgccccgggcccggccccggccccaccacctggccagaagccagcaggagaggccgtcgctgggagtggcagtggggtcctcagccggcctgcgtcggagaaggaggaagcgtctcaggaggaccggcagcggaagcaacaggagcagctgctgcagctggagcgggaacgggtagagttggaaaagctgcggcagttgcggctgcaggaggagctggagcgggagagggtggagctgcagaggcatcgtgaggaggagcagctgctggtgcagcgagagctgcaggagctgcagaccatcaagcagcatgtgctgcagcagcagcaggaagagcgccaggctcagtttgcactgcagcgtgagcagctggcacagcagcgactgcaactagagcagatccagcaactgcagcagcagctgcagctgcagctggaggagcagaagcagaggcagaaggccccctttcctgccacctgtgaggcacctagccgagggcctcccccggctgccaccgagctggcccagaatggccagtactggccaccgctgacccacgcggccttcattgctgtggcggggactgaagggcccgggcaacctcgtgagcctgtgctgcacaggggcctccccagctccgcctcagacatgtcactgcaaaccgaggagcagtgggaggcaggccgtagtggcatcaagaaacgtcactccatgccacgcctgagagatgcctgtgagccagagtcgggacctgatcccagcacggtcaggagaattgcagacagcagtgttcagacagatgatgaggagggtgagggccgctaccttgtgactcgcaggcgcaggacgcggcgcagtgctgactgcagtgtgcagacagatgatgaggacaatgccgactgggagcaacccgtccgccgccgcaggtctcgtctttcccgtcactcagactcaggctctgacagcaagcacgatgccactgcttcctcatccaccacggccgccgccactgcgagggccatgagcagcgtgggcatacagaccatcagcgactgctccgtccagaccgagcccgagcagctgcccagggtctctccagccatccacatcacggctgccaccgacccaaaggtggagattgtcaggtacatatcagcaccagaaaagactgggcgcggggagagcctggcctgccagacagaaccggatggacaggctcagggtgtggctgggccacagctcataggaccaactgccatcagcccctacctacctggcatccagatagtcaccccaggagccctgggcagatttgagaagaagaagccggatcctctggaaatcggttaccaggcccacctgcccccggagtccctgtcgcagcttgtgagccgccagcctcctaagtctccacaagtgctctactctccagtgtcgcccctgtccccacaccggctcctggacacttcgtttgcttccagtgagaggctgaacaaggctcatgtgagtccccagaagcaattcatagctgacagcacccttcgccagcagactctgcctcgccccatgaagaccctgcagcggtctctgtccgaccctaagcccctgagccccaccgccgaggagtctgccaaagagagattctccctctaccagcaccaggggggactaggtagccaggtatgggcacaggggctggtccagggtgggatgggggtctatttctagcttgaggggccccagagggaggggtttctcctggggtgggaatggagtcacctctggctccaaaggcccgggggaaggagttgaggaacaaagttccccaatggacgtctgacagagctcatggcccagcctggacaaagtcagacacacgtagggctccacagccatctgcccagacacttccaggaacctcagcctctccacagccctgtcccttcactgtctggacctggtctatttctgtcgcctcctttcaggcctcttcatttctcacctccagtctaggcaccttccactccaagccttatttagtctccacttcccatctctagatgggcttcactgcctatagcaggctcaagcctgtggcctagcatttgagacccacccatttgagggctgtagatactcttggtgcttccttgtgtcccacccaccttcttcagtaaccctacttcctaacctgcctgttcccctagtgcagtgcaggctccttgtctatggcttccattacacagccatgtattagaaccgcaagacacagcctggccatggtgccatctgtgggaagacttagagactgggaagcgggaatgctaaccactttcagtgcaaggctgaggaaggttggcttttcctgaagtctctggaaggtttttggaggtaaaacagaacaagactggtatttcagagttcccagaatgcagtgttggctgataggccaaaggagagatcccgaggagaggagggaggagtcagaagtactgggggtgaggggtgtttgcccatttttggggtgggtttatagacctgatggtggtggaggtgggtagtgatcagccccggagataaagggaacccagggtgagcactccatctgcatgggcctcccagaattgcagagcctctggagcaagtaggcggtgtggctagcagggcaggggaaccttgagcaggtagctgggctgctagagagaggtctagcaagaaaggagaggttgtctacagagagattcagtgggctgggggtgggccacaatcagggcttaggtatggcagagggtagtgcggttagaggaggaggtgggcaggcagctgagcagcatactgctctggagaggaataaaggaggaagcttagactcagagcctgtgaatagctgacagttatcctgtgccccttcctgtgactgttcttaaaggagcctggtgggtctcgcgtgttctactctgttcctccttcccctgactgccctgccctcagcccccacaggctgctaggtctcagacttcgagccagatccctcttccctcacctcagtgacaggcaagtccattggagatgtgcagggccttccaaagccactgtgcacagcacacaaaacagtctgaccctcaccaccttcctggtgcccaaagctttggaaaggactgtaaactgaccacaggcctttcccctcatggcaaagaagccaaaaccagagggtgggcagggtaaaccccaaggctgcttggcaaagcagggcatcaacagtgtggatcccagctcctgccttgaagaacctccagacctgggttcttctaccccatgcctcagcaaagtcacccacaccttgggtctcagtgctgcccacccttccctctgtctcaggtgtcggcgctgccacccaacggcctggtccgcaaggtgaagcggacactgcccagcccccctccagaggaagctcaccttcccctggctggccaggtgccctcacagctgtatgcagccagtctgctgcagcgagggttggcggggcccaccaccgtccctgctaccaaggccagcctgctccgggagctggaccgggacctgcggctggtggagcatgagtccaccaagctgcgcaagaagcaggcggagttggacgaggaggagaaggagattgacgccaagctcaagtacctggaactgggcatcacccagcgcaaggagtcgttggccaaagaccggggtggccgtgactacccacctttacgtggccttggtgagcatcgtgactacctgtctgacagcgagctcaaccagctgcggctccagggttgcaccacacccgctggccagtatgtggactaccctgcctcagctgctgtgcctgccactccctctggccccactgccttccaacagccccggttcccacctgcagccccacagtacactgcaggcagtagtggaccaactcaaaatggatttccagcccaccaggcacctacctacactggccctagcacatacccagcacctacctaccctcctgggactggttatccagctgagcctggcctgccaagccaaccggctttccaccccacaggccattacgcagccccaacgcccatgccaaccacgcagagcgcccctttcccagtgcaagctgacagtcgtgctgcccaccagaagccacggcagacttcactggctgatctggagcagaaagttcccaccaattacgaggtgattggcagccctgctgtcaccatgtcttcagcgccccctgaaaccggctacagtggtccagctgtgagcggcagctatgagcagggtaaagcccccgagcacccccggggcagtgatcgaagcagcgtgagccagagcccagcccccacgtatccctctgactcccactacaccagtctggaacagaatgttcctcgaaactatgtgatgatcgacgacatcagcgaactgacgaaggacagcacccccactgcctcggagagccagcggctggagcctttggggccaggtggagtcagtgggcgtcccgggaaggatcctggggaaccagccgtccttgagggacccactctgccctgctgctatggcagaggtgaggaagaatctgaggaggactcatatgacccccgtgggaaatctggtcatcaccggagcatggagagcaacggccggccaagcacccactattacggtgacagtgactatagacacggggctcgagcagacaagtacggtccaggacccatggggccaaagcatccctctaagagcctggccccagctgccatctcctcaaagcgcagcaagcaccggaagcaaggcatggagcaaaagatctccaagttctcacccatcgaggaggccaaggatgtggaatccgacctggcctcctatcccccgcccaccgtcagcagcagtctgacctctcggggcagaaagttccaggatgaaatcacctatgggctcaagaagaacgtgtacgaacagcagcggtactacggggtgtccagccgcgacgcggcagaggaggatgagcgcatgtacggtagcagcagccggtcccgaatggcgtcggcatacagtggggagaagctgtccagccatgactatagcagccgaggcaaagggtatgaacgggaacgggacactgcagagcgacttcaaaaggcgggctccaagccctcatccctgagcatggcccatggccgggcacggccccccatgaggagccaggcctctgaagaggagagccctgtcagccccttagggcggccccgccccgcagggggcgctcttcctcccggggacacctgcccacagttctgctccagccattccatgcctgacgtccaggaacatgtcaaggacggaccgcgggcccacgcgtataagcgtgaggagggctacatgttggatgattcccactgcgtggtttctgacagcgaaggtaatggcagctggggatgattgctgaaaatgctctgcacctgggggtctgcctgcctgccctggtccccaagatgtcccagcagggtctgtcttggcatctcatcagtgggccctgctgcaggcagtccttggctgctctacctgtgccctgcttcctggttgctggagggtggggaccttgtggcctacctgcttgtggctgtggtgtctgtccactctggttcccttgcatggcttcagctaggtctccttctatggctagccaggggttgatggtgttctgtttttggtctctgaagcgtatcacctgggccaggaggagacagactggtttgataagccccgagatgcccgctccgaccggttcaggcaccatgggggccatacagtctcctcctcccagaagcgaggccctgccaggcacagctaccatgactacgatgagccccctgaggagggcctatggcctcatgatgagggtggtccaggccggcatacctcagccaaggaacaccggcaccacagtgaccacgggaggcactcaggccgccacgctggtgaggagccaggacggcgggctgccaaaccgcacgctcgggacatgggtcgccacgaggcccgacctcaccctcaggccagccctgcccctgccatgcagaagaagggtcagcccgggtaccccagctctgctgattattcacagtcgtcccgggctccgtcagcataccaccatgcctctgagagcaaaaagggctcccggcaggcccacactgggccttctgcactgcagccaaaggcagacacccaggctcagccacagatgcaaggtcggcaggcggctccaggaccgcagcagtcgcagccaccatcatccaggcagacaccctcgggcacagcatcacgtcagccacagacacaacagcagcaacagcagcagcagcaacagcagggtcttgggcaacaagccccccagcaggctccatcccaggctcggctacagcctcagagccagccaaccacccggggcacagcccctgctgccagccaaccagcggggaaacctcagccaggccccaccacagccccagggccccagccagcaggaccggtgagttagccactccctagggcagctgcaacaactgaagtctggatgtcctgtggcttccgggtgggggtgggggtgagcaggatctcagccgcgggttctgtgttacagccacgtgcagagcaggccagcagctctaaaccacccgcagccaaagcgccccagcagggacgggctcctcaggcgcagacaactccaggacctggacctgcaggtgagctgtgcccagagtactcagagcaatctctccctataccactgtactcacctcccgaccccatcccacccccgcgggcatatgctcactaatcccccatgaacacccagtaggctgcagatctcttaccagaaaatgaggctgggccagtgagggcccagggaactatcctaggcgagcactggggagcaagggccagagccttttcttttcttgttctttcgttcatttgttcgttcgttcgtttgtttgtttattgaaacagggtcttactgtatagcctcggctggcctggaactcactgtgtagaccaggccagccttgaacctcagagatccacctgcctctgactatagaatgctgggattaaaggcatgggccaccatgcccagctgagccacagttcgttccttccttctttccttccttccttccttccttccttccttccttcttcctcccttccttccttcttccttccacttccctcctttcccctgcttgctatctcttctcctctctcttccctttagccttttttacctcctgcttccttccagcctttctcctcttggtctcctcttcctacttttatttctctagccccgaccttctacctcccaggttacctgagttcaggctccctcctcccctcataccctgaacgatcaagcacaggtttgttcataatgctttctttcctacaggggcgaagcctggagccaggcctggagggaccccaggggctcccgctagtcagccaggggcagaaggagagagtgtattctctaagatcctccctggtggggcagcagaacaagctggaaagctgacagaaggtatttgctgcctggggtcaggtccacactgagtggatgtttctttgtggaggttggggatatgggggtgattccaggtcaagccaccgtgacacagaccgcctgctggtacccagtgttttctaggtcccccttatcccttgagcctcaccttgaccaatggccccgactaggaggagtctgatccaatcactgacatctctctctctgttttctatgtcacagctgtctctgcttttggcaaaaaattttcctcattctggtgattgtgtccagaagggtgagtacctgtgcctgccatattgggagaggcctgagttactcgtggctggggagtcctctgggaagggtccagtctatagtagattgcacagtgagagctacggtgcactctcctgggagtgtgagacactgcacagagtctaagacatgggctggctcaggagagcagtcactgtgtagaccaggccatccttgaactcacacagattcaggcatgggccacattgtcccccgcaagagaaagccagggctgatgtccctcttgcctttctcaccaccctagtcttctgccgtgctctcagagtgatgggacaccttggcttgcatgtaggggacaatgctgcagaaatccatcaccttcctctgtaacgttccacaggctcctgaagacctgaagaaagacaatctcattgctgtggaaaaatctctggagtcaaaggcctgggcgcagctctggactctgcgtataacggtgagtgtcaggaccagattaaggtaaaccaaagaagtgggtgaagggaccccattcctggaagtatgaactaaaaaggacctggtatgcttctttcagctgggatgggcctagcggcccccctcagaaacagtgtgctagctggcatgatggtaaatgagtcagccatcctgacttgggaaaggggccattgacacctgttgtacccctacaacttcaggtctgtattctggacactgagttcaaagtcgtcctgaaagacagggcagactatggcttgtattggagacatcgatgtccggtgctggtgtatccaaacccagcagaacacagagctttgggcatgaagtgaagagatttttgggttcacaggttgcacttgcggctcacaaggcgaaagggtgaagaagggagagaggaacacagaaaagggacacaggaaaagcagtcactggtcagctagtcagtccaactccagggcagcccagtgagagaacaggaaggtacaggataggtaccccctcttcctagattgtagtggccaggggagatgggatgctccctctcagagcctgccccagtcctggtcttggccctgcctctgtggacagaagaggacatccctcatttagaattggggagagtagcctagttgttgaagttgctctttgcacagccaagaatgacccatctcgccatctccctgaggcctctcgtctccagctctttttcctgctctcgagttaagcatatggagatatgtgggcagccataacatctcaggtgctactcaggggaggtgggggagggacagcccatggcccaggtccaggatagtagtcagtaagcagttcactttaagggagccttagagcaccagagcccttacttatctgctcgtggtagagaggaagctgtgtgtgggtaccaagggctgccagtcttttcagaggcacggaggcactgaaaaggctcagtctctcatccacttattcaacaaatgctgatctagccccagatatgtgcccaatcctgttttagtccttggggacacaatagcagtcaaaaccgagttcccgtccttttgagtcaacagtccactaagggagacaaagagtaaataagttccaaaataaaacatctgcatgactggtaatgcacgcctttgaccccagcacttgaaggcagaggcaggtggttctctgtgaatttaaggccaacctggtctacagagcgagttccaggacagccagggctacacagagaaactgtgcctcaaagcaaaacaacaacaacaacaacaaaacaaaataaacaacccccnnnnnnnnnnnnnnnnnnnnnnnnnnnnnnnnnnnnnnnnnnnnnnnnnnnnnnnnnnnnnnnnnnnnnnnnnnnnnnnnnnnnnnnnnnnnnnnnnnnnnnnnnnnnnnnnnnnnnnnnnnnnnnnnnnnnnnnnnnnnnnnnnnnnnnnnnnnnnnnnnnnnnnnnnnnnnnnnnnnnnnnnnnnnnnnnnnnnnnnnnnnnnnnnnnnnnnnnnnnnnnnnnnnnnnnnnnnnnnnnnnnnnnnnnnnnnnnnnnnnnnnnnnnnnnnnnnnnnnnnnnnactgcctggcaaaaggattttctgatggcaaatgtgcagcagggtttctgcagcagctggagctgccctagagaaagtagtcagagctggaggcacgggaaagcagggtgccagccgcgcttctgatgctgaggggaactggtcggcctcagagacaggcagagaggaacacagctcggccgtggcagagtagcagtgaccagtgctattttaggcaggtacaataggccaaagtgaagaccttgggctttctgctagtgacagccaccccagtgctgacaccatctgagtgctgcctgacagcatgctccctgcctttgctgtcaggcagtggatgccctgtcatcctccctctcagctggacagtttcttggtgtgccctggaacatacataaaatctcaagtggtatttaggggagatggggagggacagcccacggctcgggtccaggacagcacccaccctgagtttggggccagagaactacgaggaagaaaaggcagcacacctgtgctttgggccacatcttgccatcatgtgggcaggccactgggaccgtgactctgtagctaagagctgcctgattctggcacttggccaacatttgggctaggtggtcaaagctgctccatatgtccctctcctggtgtccttcatgtcagtttcagacatgagctaggagatgtttgtcttttgaaacaaaaccccatctccctcactcttcttggttttgtttgtttgttttttgagactgggtctcatttgtaggactgaccgatctgtaactcaatatatagagatcaagctaaccgtgaacttgtagtgagtttcctccctccattacttaaggctagggttatgggtgtccactgtcatacctggcttcctatacacttacaaaataaatgtcaaagggccagcaagatggctcagtggttaaaggtgtttgttgccaaagcctgaaagtccgagtttaaatcctagactccaaatggtggaagggagaaccacctcctgcgctttaccctctgacccccacgtgcaggtgtatatatacacacaatcatataatatatacacacaatcatataatatatacacacaatcatataatatatacacacaatcatataatatatacacacaatcatataacatatacacacaatcatataacatatacacacaatcatataatatatacacataatcatataatatatacacacaatcatataacatatacacacaatcatataatatatacacacaatcatataatatatacacacaatcatataacatatacacacaatcatataatatatacacacaatcatataatatatacacacacaatcatataatatatacacacaatcatgtaatatatatacacaatcatataatatatacacacaatcataaaagaagttggacacggcacatgcctgtgccgtaggctaagtgactagagggtcgctctggtgtcactttgggtgatgtaatgaagccctgctgtctcaaatggcacaggaagaagggaggtcttttcctggaggtctggctctcccttctcccgatcagtctttaacctgcgcagatgctaacctctctatgccttgacggaatgcaatcttctgggtgaagcagaaactggccatcacatggcagtgcctaggagcaatgtaaggagggtggcaaactatgaccagggttcacaacaacaaacccttcttccttctctccctctctccttctcttttcaaagcatctacaagctggcaaacctttggcccaaagattcccagcaggcgggccccagcaggcaggcctcaaccaagcatgagaatgacatgtgttctcacagcagcgacctaggtgaagcatctgccggaccaatgggaccattggcttgggggacctttcatgtctttcaagagaccctgccttactcaggccagccgtccttgggagcgaggagccctcctcaccagaacgcggttgctgctgttgctgtctgctgctcttcccgcagcctcctgtggcctggccaccaggcttccaatgcgttatacacagagtttgggtgcacactgccctcctctaagatgccagaagttttttccacagccttggagaggggctttgactgagggctggggccctgggctccgattccttcacattccagctggcccggatccctgtgtggccataaggccttgccctcgtcaccctgctctgggggtgacactggagcagacgtccacatggccagcatgggtttgggagaactttacaaacattaggaccctaacactgtctcatcgctgaaacaagaggccatagcaccgaaacgcagcgtgggcaccggctgaggcttctcccagcccgtggatggcagcgtaactaggcatgcctgccatcaccttaaagccatccccccagccattgtgagcaccccagcagcaccgccattgtctcgaccagccggctcctcggctcctcatctctacacctgaggatttcttttgatttcaggaacagccttaatcattccagtttgatttacatgtatacctcatgaacatttttttgttgttgttgttttatttttctttctctccctttcttttctttgcttttatccctttgtctctcccccaccccacccccaccccgcaacctcgtgactgatggtttggtttcctctctgctctgcccctgctcagcacagggagaaacgttgatttagaagcaatagcgggcagcaggccaccaagagcacaaacccagggcgaggtctagggaggctcctcagcccgcctgtttactgtcttcttaagccatcagcagtgggtgtgctcagagcagaggagccaagggagagcttcagagacctgtgaggtaaggggagtataacaccgtccattcacctcgtggactgggctacatgcctccccaaagcccttccctgggaggcctcccttcatctcgggcccagccacaagtctcatctctaatgttctatgcaatgaaatataaaccctcaaagacaactgttaatatttaataaattccgtgttacatataaggagttaattgcaaacatgcagttgagaaactggatagctctatctgctcataccatcaccccaacccaatccttgtccccacattctgtgtgtgtgagagagaaatggagagcgtgagtgcgtgtgtgcgtgcgtgcgtgcgtgcgtgcgtgcgtgcgtgtgtgtgtgtgtgtgtgtgtgtgtatgcgcgtgtgcaggtgtgcatgtgtaaattttaagtctgtggcatgtttgacctgtggcaggactcgctgcttgccaggtgagtcgccgcctgtctggcactggagcatgcacggctcgaagcttctttgcacgatttcattcattttaaatgcccgacctcttgcttggagttcttttcgcctccaaacctctcctttaggagcgcttctccctgactttgggacacgctagtaaagacctgccagaactgcctacatttgccaggccagggagcaggcagtgaggccccagacaccttgcagtttttatctgtgtacaatagcagataaaaacaaaccttagactagacagagaggggagcccgcacaggatgcatgtgtatggacattctgtgggtttgctgtaggatttctacttgtatatcatttttcctcctatcccaggcctgagccaaaagaaactggtcacatcttcccagtggggtactgctcaagggcaaagcttggggcacatctgtggagaggcagaagccaagggatcctggctgtgccctatgattcccagatcttgactgactctgctctatgtctctcctttgtgatgaagaagcttaaaggattgtgagccaagagatctatctggagtggagccaggggtcataaggtacccagaaggagctggctatggctgaaaatatcattcaggaaaaaactgttcacataaataacagcttcaaactgagcccagaaggtctctcaagagcaaaacttactgaagggttggtgtaaccctctccacatctgccccaggacttgcctcctctgaggcataagtatcacactgttgtcagcatctccctcactggcccaggagtagggcagacagtacctgcctgacccctaaagtctggcctgcctccagagagctttggtgtataccatgcatttctcaggggttcacgtttctcatgcatttttacaaggcttataaatcctttagtgtgggatcctgtcccaccatcggcagctgtggttgggacacttcaagctgtgttggacttaagagcccgagttcccgggatttagctttcttcacactatggaatatctcagagatcaaacttgggctatatggggccatcgctaaaagggctgaagaaggccctctttgaggaactcccaggcccaggtgtgtacaggatgtgcccagggtctagatacctgggaccatgactgtattcctttcctctcagagtcaaggggctagactaggggatgagggcaggcagggtgtccacgggtcagtctctggctgacccctaggctctaaagtattaactttacagcacatttcttttctgacatttctgatatctgctactctatccctggctgtgcccacaggacagatctttgcccttctgtgaatatgactgcaggagtcttctaggccataggtatccctggcccttatgttgactctgtgtagagcccagacctccattttctcccctcttagtgtcataagcaagggcaccctcctctgcccacgcaaggcctcaacacactcacttcatagggatggtcctcgcaccatcttcttcctgttctttgggcagggtgaacagtctcagggcccacactgaaagaacagccagggcagcaattctggtctgtatgctggagcctctggggagttttccaggcaggtccttgtccgtgagagtacagtcctgcccaatagcccttctcctcccttgctgtaaataatgtgtcatcatggactccatcagggccggagggacatatataatcaaatgaaactctctggagatgccatctctgtctccctgggtgccagcaccctgctaccatgtgcaccgggtggcactggagagccatagaagtcatgagatactgtatgtgtaagcacatgtacatgagtgtgtgtgtgtgtgtgtgtgtgtgtgtatgtatgtatgtatgtgtgagtgtgtgtgtgtgtttgtgcgtgtgtgcacgagtctcattcagcctctggggtcaaatcaattcctctcaagtgtggtaccctagagagtggtggccatctacattttctccctctagcttctatgtcttgtttttgctttccctcccctcctcctcccctctctctccttctctctgtgaggggggagagtgctgtacaaagtcaaacaaacaagtttacattgtaagtgcaatgacccgagtcctccacatgaccttgtgaattgtgtgccgtcctcctgtgctctgtgagaactcgtggtacttcagtgtccctcccctgtactgtgacaaggtatttctgtggtatcagaataaaaggacttgatataaacaaccttcagacagtctcggggtgatttctgaagtgggaacacttagccaaacaggtagatgccaacgtttgtgacagtattctccacgattaaagaaaaaaatgagaaagagcaaaatttcagaaatgttggcacaattgaggcggagtcaacaccaagccattcaaacatgaccctccaggaaggtgcaaaggcttgtcctaagccaccagacagttttcaggatcctggttcccaggagctagatgggcaagtgctgccccctggtgctatcaaacaagctttacatctgcctaccttgttcgaaactccccccccccccccagtcccccatggctgagactttaatccttagtatagtcaagaatagttcaagctggatatcatagcccacacatttaatcccagctcttgggagacagagataggtgggtctctgtgagtttgaggccagaactacgtagagaaactaaacaaatataagttaagcagcactagaaaataagaaacagagattaaagagtatcaattttgcctcaagtaagaaagaaagcactcattcaagggggcccatagctggtctaaaagaccagccactctcaagctatatggaggagggggagatacctactgttgcccaaccactcttgctctctgctgtcacctaagtcaacctagtcctgtgtcgtgtgcaggagactgtctgcctaggctcttctttccacagcacgctcgctgctcttaggtgaagtctgaccctccacatcggcccttggagtaggttgagacccagtcggctcacgatccgcagcaaggagcttctgagaagggcgggttaaggctgtggcaacagatagctttaggggcaagtctggtgattgataagccagggtagcacccagagagttcagcaccgccctttgcccggcgccccagggctccacccgggaacctaagtttcccactcctaatcgcctggcttgcagtagatggggagagcgctgaaagagatccctgcgactgaggcgccccgcaacattccgctttcacagacccgctagtctctgtattcggttcccacccgtccccgcccccgcccccgccccctcatccttaaggatcattagtgttcctccgaagccccacccttcgaacgctcagggctttctctctgatcccgcagctttcagctcacagtcggctggagtccaatcctacttccttcactcctcccagacctgccctgtctctgaacaccggctctgtattctgctgctatacgtccgccctcactcctcggagcctcccctctctaaaaatcccaggactcgactccctgattctgcctcccacttgcctagtcttcgactgaatttttgtttcccgctcctcccctccgggcggctccttcgtaggccccgccttcttactatccaggccccgccccctgccgactggccggagcttatacagggccctgcgggtcccaggtcgccactgagtgtagcggaaactggggaccgccttaggccccgcccccggagcttcacttccgggacttagctgctaccgaaagaccgactatggagcgtcaggtgagggctcggcccgtggcccccgtggcctccgtagcccgggctgagcctgaccctggtgtgtcccctgcgcaggtgctgctgagtgagccccaggaggcggcagcgctgtaccggggccttagccgccagccttcgctgagcgccgcctgcctgggcccggaggtcaccacgcagtatgggggcctctatcggactgtgcacactggtgtgtagaccgagggaactgggtggcgacgggccgtgcatccaggtggagagatggggactgtggagggcacgctgcttgacacgggtttggggaggaaacccaactgtagttcctgcgcacaggtgttttgggggctgcactagccttactgataaataattccgtaaatgagttgaaggtgtgggagtaaaattcagacctgagtgcaaggtgtgggcctcgcaggactctccggcccttacattctacaacccaacaacagctatgttgcccttaaaattctgtggttggtagtgggttctctctgaccgtcagctcaggctctgggagcctaggcttaggttatattaagtgaagtgttgtccaggctatactcaggctgtccggagacagactgggaaagataggccttgattggtgggcagtggtccaaactggcccagacaagttgagcagccccctgcctcccttgcagagtggactcagagggacttggatcgaatggagaacatccgattctgccgccagtacctagtgttccatgatggagactcggtggtgtttgccgggcctgcgggcaacagtgtggaaacccggggggagtaagtgtgacaggagcagtctgtagacaagaccgcagccacctgccttgctagcctttcataaatgtcgccatgtgtccttagggtgttgtgctctgtgcctatccccttcagggacaactttgggtggcttcaggggagcaaagagcaaggtgcctgacccctgagagcttgtctggtctctggagacatggcctgataaatactaggagcttcttctaaactagggcctaggtccctaggactctggagacagtcgagtcagtaacctaaggaagagaaaaaaggccagccagcttgaggctgggagtgcttcatgggctggtatgatttcagagtcccagttagctgggagatagcctcctgtgcggccaattctgattttataacgccagacctaaaagggcttataaagaaaggagagagagacagacagacagacagagacagagactcagctaagaggttgtgaccagtaagggggccagcacaaggctgttgggggggacgacttggcaccttcctgacctgcaacccctgttctcaggctgctgagcagagagtctccttcaggcaccatgaaagcagtgctgcgcaaggctggaggtgcagtctcgggagaggaaaaacagttcttggaggtgagtttgcaaggatgaggtggcagccagccggtcacttagtgccacaagtgaagccctgtggaggggcaagcagcctgatgcccaggtatcttcaggtctgggagaagaaccgcaagctcaagagtttcaacctgtctgcactggagaagcatgggcctgtgtatgaagatggtgaggcgcctggctggtaagcaggaggggtgggcagaaggggcagctatagcattgggctccccctaaccgtccctccctgcatgcagactgctttggctgcctctcctggtcacactcagagacgcacttgttgtatgtggcggagaagaagcgtcccaaagctgagtccttctttcaaaccaaagccttggacgtcagtgccagtgatgaggagatggccaggccgaagaagccagaccaggccatcaaggtgcttgtggtgtggccgggccacacaggccctgccgggcagccctgccctacatccggtggacctgggaggccctagtgtctaggaggcaggtcagggttctgtaggcaccctgggcattgagtgtcctctgttctcagggggaccagtttgtattttatgaagactggggagaaactatggtttccaaaagcatccctgtgctctgcgtgctggatatcgagagtggtaacatctccgtgcttgagggcgtccctgaaaatgtgtcccctggtcaggtcagcagcaacatggcctttgccccttctggagtcggggtcccctgcttgagcgattacgtcttgctcatacctactttgtggttttgtttgcaggctttctgggcccctggagacacgggtgtggtgtttgtgggctggtggcacgaacccttccggctaggtatccgctactgcaccaatcgcaggtgagaaagcaggcagaccagagggcccttacggcccagctgaccatagagctgagtgtctctctgacctttccaggtcagccctgtactatgtggacctgagcggggggaagtgtggtaagtgtctggcgtccgcacgtgctttcctgactgttagtcttccctggtctatgtgatactcatatttctgtggcctagaactactctcggatgagtccctggctgtctgctctcctcggctgagcccagaccagtgtcgcgtcgtctacctgcagtacccatctctagcccctcatcaccagtgcagccagctcttcctggtgagctgaagtgggtggggtgggaggacggttagctcttgatggggaatgagggctaaagggatggtgtcatctcccccctcggggccctctcctgtcctccgtggaccagtggcctgacccttcaaggtaagtcctggaagcttgggtactctcagggctcaccacctcaaggggtcctccagccacagagatgctcgcgcgtcttagttcacgtctccaagtagccgggctctacaaggagcaggggcagagttgggggttatatagagtccatcccctgcacaaggagagctctgggtgaaaagccaagggacatgcctatctgagacaagtccaggctcccataaaagaggtaaattagcccccatctctcctaagtagtcacccaaagggatagataacagagttctgtgccctgaggtccatggcctggtgggtttgaccattttgttctcttgcagtatgactggtacaccaaggtcacctcattggtggtggacattgtacctcggcagctgggaggtaagaggtgcctggctcatcagtggagtctgtaatagtgctatctgtccctccttcctgagttcctttggaggactctctccttgttactgcagccctgtgcccaggcccaacagagacagaagatgctactatgggtaatagtctgagagtttttggctagaccaaaactaaggtcagagtagctcaaattggcttgggatgagtctcaggaaatatgttagtttggaatattatgcctgagaagccttggggctgcaggctctgtgttactctgtgttcaaccccacgccaccccagcaacctttgtccagtctaagtcagctggtcctccggaaaggtagctctgaggctcctttctcaacatcaggtacttgcagctctgcctgcagtctaggggcatcctaaggacacagggatgaaagttttcttttctcaagccacccagaaaggtccaagggtccagtgggcaggtccagtgcacaaagttgcagggatacagctggaatgcagctcagtggtcaagcacaaggctagcatgtgcgaagccctgcacttgatccttagttacacttttggtttacaaggactcgatagtagggacgtagtctaacctcggctctgcccgttagtcatgtgtccagggtcagtgccctggcctccatgagcttgtttcttcacttgtggacggggtggttatgtcccccctccaagctcccgtgtgagctgctgtgctctgcactgcggtggacaaacacgttctatataaggttaaggcacttaatgttgccaagacccaaagggagcaaccaataggaaagcgtcacgtttgccgcctgagctttccagctctgcctctatgggtcctcagaagcctctcctcccgcccccttcaccttctactcggtaaactccccactgccaagggtaccctcatgtctaggactgtgattctactacagatttcaggggccctgtgtgaattccccaacctcatcttctcgatccctcaggcctccactcttagatgcagcttcagtgtttctgtctttgcagagagcttctctgggatctactgcagcctccttcctttgggatgctggtcagctgacagccagagagtggtcttcgactcggtccagcgcagtcggcaggtaaaagcccctgattgtgtcaggaggtagcatcaacaacgtctgccctctgacggtctgccgaggagtttaggacctggggcagagggcgtgcacggccctagaggagccgagccagaaagaattagctgagcccttgaagtcttttctgctggacttgctgttcctcaagggggccaaatgctctgctgccccacagaagaggcccaagccttgggcagtccctgaacactttatagtgacagttgatggagcctggatgggtccttagggatgatgtgctggcatgtcccatggtcctttgggtatggcattatttgttctcctatccttccgttccttgcctgggtgtatccggcacgttgtgaaggaactgaatctagatccagggttcttcttgtttcacagagtagccatcaccataggccaaagtggccctaagccagtagaaaggaaataggggcaggccccagagggctgttggatgtggtgctacaagtagtctcccctctgtttaaggacctgtttgctgtggacacccagacaggaagtgtcacctccctgacagctggtgagcaggacctctgccatagggtgacagcagggtgatggcaggggttggggatgggcagccaggggcgggtggatgggtagccgcttaggaaaggagctagagcttgacccagggcagcagtggtacgttccgtcattctcacccccgatgcgccacaggctttgccagcagtgccctgaggagccagccaggacactacctcttttcttcgctgcactattacctccatatgccctagccccatagctccacccctgtcctaagctctacagacctttcttgccaggctagtatagtcatccacctcctgcccagaccctggagaaaccactgctggactctctagcttccccacactcaccccaatggtctccctctgaaccagcctttgagttctccacctgccttggctctgcacacatctgcatccccgaggtgggtcagaaagaggctgtcttagggtttctactgctatgattgtggtaactcttcattaggaaacagttaattggggctggcttacagtttccgtttcagaggtttagtccattatcgtgatggcagaaagcactcaggcagacatggtgctggagagggaacccagagttctacatctgaattgactggaagcaggaagagagtgacagtggacctggcatgagcttctgaaacctcaaagcctaccctcaatggcacactttaacggccacagctactccaatgaggccacacctcttaatagtgccactccttatgaggcttttggggaccatttttattcaaaccactacagatgccaaagttctagttctacatctctggcttaggacatagctccttcctagggtgtttccctagcataagcctagtgcatagtaaatagtaataacaacaataacaataacgagtggacaaacgttagaccagtcctctttcctacacccagtaggaaaaggctatcatccttgtcacaccgaagtcattggagtaggtagagtactttggtagctttctgtgtccctaggtcgggcaattcttgagcatagcctgtgtctgtcagatgaacaggaggcttacttaggacatatgcagttaggtgtgcatctcagggttaaaggtagaaaagttgtccctgccaggcacttatatcatctgcttcctctaggggggtcagcgggaagctggaagctgcttacaattgaccgagaccttatggtggcccagttctccacacccaacctgcccccgagcctggtgagtattgtgggtcccaggctagaagacaggaattacaagcttccatgccttagaactgggcccaaagactgaccatggttggtcagcatgtagaagggcagagacgactgggctccagcctagtccaatggttctttgagctcaacactcatgagtaggaaccaggggctaacatttgcaccatcctgaacagtgtgcctacaaaagtgcccagtcatttattattagagtccagggagaaagggaaacctcgaagccaagaagttggtagggccaggggtggttcagatgtggatgtctcccgcatacaccactcaacaagaatctatgctgtgctcttcagagatgggttcctgagagctggcctacctgtgacactctccttccccctggcagaaagtcgggttcctgcctcctgctgggaaggagcagtctgtgtcatgggtgtcactggaggaggctgaacctattcctgacatccactggggcatccgagtgctgcacccacctcc

SEQ ID NO: 2433 - DNA, 14099 bp, Mus musculus
atgggcaacgaggccagcctggaggccggcgcgggcgaagggtccgctgccgcccggaggctctggtctgggtccgggccccggagcagggaagccgccttcagcactagctggcggcggacagctccccgtggctggcgctgcgcgagcggcgggacccccgacccctggtctcggtccggtccccggccctggccccggccccggcccgggcagtgttccccggagactggaccccaaagagcccctgggcagccagagaacaacttctccaaccccaaagcaagcatctgctactgctcctggccgagagagcccccgagagacaagggcccaaggcccatcaggccaggaggccgaaagtccccgcaggacgctgcaggtagacagcaggacacagagatcaggacggtccccctcggtgtcaccggacagaggcagcactcccacgtcaccctactctgtcccccagattgcccctcttcccagcagcaccctgtgtccaatatgcaagacctcggacctcacatcaacccccagccagccaaacttcaacacctgcacccagtgtcacaacaaggtctgcaaccaatgtgggttcaaccccaaccctcacctcacccaggtgaaggagtggctctgtttgaactgtcagatgcagagggccctaggaatggacatgaccactgcgcctcggtccaagagccagcagcagctacactccccggccctgtctcctgcccactccccagccaaacagcctctggggaagccagagcaagagcgatctcctcggggcccaggggccacacagtctggtccccgccaggctgaagcagccagggccacctcagtgcctgggcctacccaggcaactgcccctccagaggtgggaagggtgtctcctcagccccctctctccaccaagccttccacagctgagcccaggccacctgcaggagaggcccagggcaaaagtgccaccacagtgccctctgggcttggtgctggtgaacagacccaggaaggcctcaccgggaagctcttcggccttggagcatcactgctgacccaggcgagcacccttatgtctgtgcagccagaggctgacacccagggccagccttccccaagcaaggggcaacccaagattgtcttcagtgatgccagcaaggaggcgggtccaagacccccaggctcagggcctgggcctgggccaacacctggagccaaaaccgagcctggggctagaatgggtcctggatcagggcctggagccctggcaaaaactggaggaaccgccagtccaaagcacggcagagcagaacaccaggcagcatccaaggctgctgccaagccaaagaccatgccgaaggaaagggcctccgcctgcccactgtgccaagccgagctcaacatgggtagcaggggcccagccaactacaacacctgcactgcctgcaagctccaggtgtgcaacctgtgtggctttaacccaacaccgcatctggtggagaaaacagagtggctctgtctgaactgccaaactaagcggctgctggagggcagcttgggggagccagcccccctgcctctgcccaccccacagcagcctcctgcaggagtccctcaccgagcagctggagcagcccctctgaagcagaaagggccacaggggctgggccagccctcaggctccctgcctgccaaggccagcccccaggccaccaaggccagccctcaggccaccaaggccagccctcaggccaccaaggccagccctcagaccaccaaggccagccctcaggccaagcctctcagggctactgaacccagcaagacctctagcagcgcccaggaaaagaagacagtgacctctgctaaagctgagcctgtgccgaagccacctccagagactactgtgcctcctgggactcctaaagcaaaaagtggggtgaagaggactgaccctgccaccccagttgtcaagcctgttccagaagctcccaagggtggggaggctgaggaaccagtccccaagccttattctcaggacctgtctcgaagcccacagagcctcagtgacacaggctactcctccgacggtgtctccagctcccagagcgagatcacaggtgttgtacagcaagaagtggaacagcttgacagtgcaggggtgacaggcccacgtccacccagcccctcggagctccacaaagtgggtagtagcttgcgcccttcactggaggcccaggctgtagctcccagtgcggaatggagcaagccaccccgcagcagcagcagtgcggttgaagaccagaaacggcgtcctcactccctgtccatcacgcccgaggccttcgactcggatgaggaactgggggacattctagaggaggacgactccttggcatggggacgtcagagggaacagcaggacacagctgagtcttcagatgactttggcagccagctgaggcatgactacgtggaagacagcagcgaaggcggcttgtctcccctcccacctcagcccccagcccgggcagacatgactgatgaagaattcatgcggcgacagatcctagaaatgagtgccgaggaagacaacttggaggaagacgacactgctgtctctggacgaggcctggccaaacacagcgcccagaaggcaagtgccaggcccagaccggaatctagccaagaacccaagaggcgccttccccataatgccaccacaggctacgaggaactcctatctgaggcaggcccagcagagcccacggatagcagcggagcccttcagggaggtctccgacgttttaaaaccatcgagctcaacagcacgggtagctatggtcatgagctagaccttggccaaggtcctgatcccaacctggaccgggagcctgagctggagatggagagcctcacaggctcacccgaagaccgctctcgtggggagcactcctctacgttgccggcctccacacctagctatacatctggcacctcacccacctccctgtcttcactggaggaggacagtgacagcagccccagccgccggcagcgcctagaagaagcaaagcagcagcgcaaggcgcggcaccgctcccacgggcccctgctgcccaccatcgaggactcctccgaggaggaggagctgcgggaagaagaggagctgctgcgtgagcaggagaagatgcgggaggtggaacagcagcgaattcgaagcacagcccgcaagacccggcgtgacaaggaagagcttcgagctcagcggcggcgtgaacgctccaagacaccacccagtaacctgtcacccattgaagatgcgtcccctacagaggagctgaggcaggcagcggagatggaggagctacaccgctcttcctgctctgagtactccccctccccctccctggactcagaggcggagaccctagatggcggccccactcggctctacaagtctggcagcgagtacaacctgccggcctttatgtctctctactcaccgactgagaccccttcgggcagttccaccacgcccagttctggacggccccttaagagtgcggaggaggcctacgaggacatgatgagaaaagctgagatgctccagagacagcagggccaggtggcaggggcccggggaccccatggtggcccctctcagcccacgggcccccgcagccagggctcctttgaatatcaagacacccaagaccatgactatggcggcagggcttctcagccggtggcagaaagcacgcccgcaggccttggagcggccgtgtacgaggagatccttcagacatcccagagcatagcccggatgcggcaggcctcctcgcgggatctgggcttcactgaggacaaaaagaaggagaagcagtttctgaatgccgagagcgcatacatggacccaatgaagcaaaatggtggcccacttacccctgggaccagccccacccagcttgctgcccccgtgtctttttccacctccacctcctcagacagcagcggtggccgagttatccccgatgtccgagtcactcagcattttgcaaaagagcctcaggatcctctcaagctgcacagctctcctgtctcctccactttgacctctaaggaggtaggcatgaccttctcccagggtcctgggtcaccagccaccacagccagtccgacacgagggtatatgactccaacctccccagctggctctgagcgtagcccatcaacgtcttccacaatccacagctatgggcagcccccaaccactgctaactatgggtctcaaacggaggagctgccccacgctcccagtggccctcctggaagtggacgggcccccagagagaagcctctgagtgggggtgacagtgaggtcggtgccccccagccttctcggggatattcttactttacgggctctagcccacctctctctccatctaccccctctgagagccccacattctcaccaggcaagctgggccccagggccacagcagagttctctacacagacgccaagcctaacgctttcctctgacattccgaggagccccggccccccctcccccatggtagcccaaggcacacagactccacaccgacctagcactcctcgattggtgtggcagcagtcttcccaggaggcccctattatggtcatcactctggcgtcggatgcttcgagccagaccagaatggtgcatgccagtgcctcgacttcccctctgtgctcacctacagactctcagcccacctcccacagctacagccagacaacacctccaagtgcatctcaaatgccctcggaaccggctgggccacctggctttccacgagcacccagtgctggtacagacggacccctggcactgtacggctggggtgccctccctgctgaaaacatctcgctatgccggatctcctctgtccctggaacatctagagttgagccaggcccccggcccccgggcactgcggtggtagacctccgcacagccgtcaagcccacccccattatccttaccgaccagggtatggatctgacctctcttgctgtggaagcaaggaagtatggcctggccctggatccagtctcaggacgccagtcaaccgctgtgcagcctttggttatcaacctcaatgcccaagagcagacccataccttcctggccactgccaccacggtgagcatcacaatggcctcatctgtgctcatggctcagcaaaagcagccagtggtatacggagatcctttccagagccgcctcgactttggccagggttcaggtagccccgtgtgcctggcgcaggtcaagcaagtagagcaggctgtccagacagccccgtaccgaggtgggcccaggggaagacccagggaggctaagtttgccaggtataaccttcccaaccaagtaacacctctggccagaagggacattctgatcacccagatgggcaccgcccagggtgtgggcctgaagccaggaccagtgccagagcccggtgctgaaccccaccgggctactcctgcagagctccggtcacatgctcctccaggtaccaggaagccacacacagtggtggtacagatgggagagggcacagccggcacagtgactaccctgctcccagaagagccggcaggtgccctggacctcaccggaatgaggcccgagagccagctggcatgctgtgacatggtctacaagtttccttttggcagtagctgcactggcaccttccatcctgcccctagcgcacccgacaagagtgtgaccgatacagccctgcctggccaaagcagtggccccttctacagtcccagagaccctgagccccctgagcccctcaccttccgcacacagggggtagtaggacctgggccccatgaagaacagaggccctacccacagggcctgcctggaaggctatactcctccatgtctgacaccaatttggccgaagctggcctcaactaccatgcccagaggcttgggcagctcttccagggacctgggagggactcggcagtggacctcagctcactgaagcactcgtacagcttaggctttgctgatggacgctacttagggcagggcttacagtatggctccttcacggacctgcgtcaccccacagaccttttgtctcacccacttcccctgcggcgctatagctcggtgtcaaacatctattcagatcataggtacggcccacggggagatgcagttggcttccaggaggccagcctggcccagtacagtgccaccacagcccgagagatcagccgcatgtgtgctgccctcaactccatggaccagtacggtgggcggcatggcagcgggagtggtgggcctgaccttgtgcagtatcagccccagcatgggcctggcctcagtgctccacagggtctggctccccttagatccggcctccttggcaaccccacctacccagaagggcagccaagccctggaaaccttgctcagtatgggcctgcagcaagccaagcaacagcagtcagacagctactcccgtccacagcaacagtgcgcgcagccgatggcatgatctattcgactatcaataccccaattgctgcaacgctgcccatcaccacccagcctgcctcggtactgcggcccatggtgcgtggtggcatgtacaggccttatgtatctggtggagtcacagctgtgccccttaccagcctgacccgtgtgcccatgattgctcctcgggtacctcttggaccagcagggctataccgctatcctgcaccaagattccccattgcttccagcgttccacctgctgaaggacctgtctatttggggaagcctgctgcagccaaggcctcgggggcaggaggtccgccaaggcctgagctaccagcaggggttgctcgtgaagaacccttttccacaactgcccctgctgtcatcaaggaagcccccgtggcccctgccccgggcccggccccggccccaccacctggccagaagccagcaggagaggccgtcgctgggagtggcagtggggtcctcagccggcctgcgtcggagaaggaggaagcgtctcaggaggaccggcagcggaagcaacaggagcagctgctgcagctggagcgggaacgggtagagttggaaaagctgcggcagttgcggctgcaggaggagctggagcgggagagggtggagctgcagaggcatcgtgaggaggagcagctgctggtgcagcgagagctgcaggagctgcagaccatcaagcagcatgtgctgcagcagcagcaggaagagcgccaggctcagtttgcactgcagcgtgagcagctggcacagcagcgactgcaactagagcagatccagcaactgcagcagcagctgcagctgcagctggaggagcagaagcagaggcagaaggccccctttcctgccacctgtgaggcacctagccgagggcctcccccggctgccaccgagctggcccagaatggccagtactggccaccgctgacccacgcggccttcattgctgtggcggggactgaagggcccgggcaacctcgtgagcctgtgctgcacaggggcctccccagctccgcctcagacatgtcactgcaaaccgaggagcagtgggaggcaggccgtagtggcatcaagaaacgtcactccatgccacgcctgagagatgcctgtgagccagagtcgggacctgatcccagcacggtcaggagaattgcagacagcagtgttcagacagatgatgaggagggtgagggccgctaccttgtgactcgcaggcgcaggacgcggcgcagtgctgactgcagtgtgcagacagatgatgaggacaatgccgactgggagcaacccgtccgccgccgcaggtctcgtctttcccgtcactcagactcaggctctgacagcaagcacgatgccactgcttcctcatccaccacggccgccgccactgcgagggccatgagcagcgtgggcatacagaccatcagcgactgctccgtccagaccgagcccgagcagctgcccagggtctctccagccatccacatcacggctgccaccgacccaaaggtggagattgtcaggtacatatcagcaccagaaaagactgggcgcggggagagcctggcctgccagacagaaccggatggacaggctcagggtgtggctgggccacagctcataggaccaactgccatcagcccctacctacctggcatccagatagtcaccccaggagccctgggcagatttgagaagaagaagccggatcctctggaaatcggttaccaggcccacctgcccccggagtccctgtcgcagcttgtgagccgccagcctcctaagtctccacaagtgctctactctccagtgtcgcccctgtccccacaccggctcctggacacttcgtttgcttccagtgagaggctgaacaaggctcatgtgagtccccagaagcaattcatagctgacagcacccttcgccagcagactctgcctcgccccatgaagaccctgcagcggtctctgtccgaccctaagcccctgagccccaccgccgaggagtctgccaaagagagattctccctctaccagcaccaggggggactaggtagccaggtgtcggcgctgccacccaacggcctggtccgcaaggtgaagcggacactgcccagcccccctccagaggaagctcaccttcccctggctggccaggtgccctcacagctgtatgcagccagtctgctgcagcgagggttggcggggcccaccaccgtccctgctaccaaggccagcctgctccgggagctggaccgggacctgcggctggtggagcatgagtccaccaagctgcgcaagaagcaggcggagttggacgaggaggagaaggagattgacgccaagctcaagtacctggaactgggcatcacccagcgcaaggagtcgttggccaaagaccggggtggccgtgactacccacctttacgtggccttggtgagcatcgtgactacctgtctgacagcgagctcaaccagctgcggctccagggttgcaccacacccgctggccagtatgtggactaccctgcctcagctgctgtgcctgccactccctctggccccactgccttccaacagccccggttcccacctgcagccccacagtacactgcaggcagtagtggaccaactcaaaatggatttccagcccaccaggcacctacctacactggccctagcacatacccagcacctacctaccctcctgggactggttatccagctgagcctggcctgccaagccaaccggctttccaccccacaggccattacgcagccccaacgcccatgccaaccacgcagagcgcccctttcccagtgcaagctgacagtcgtgctgcccaccagaagccacggcagacttcactggctgatctggagcagaaagttcccaccaattacgaggtgattggcagccctgctgtcaccatgtcttcagcgccccctgaaaccggctacagtggtccagctgtgagcggcagctatgagcagggtaaagcccccgagcacccccggggcagtgatcgaagcagcgtgagccagagcccagcccccacgtatccctctgactcccactacaccagtctggaacagaatgttcctcgaaactatgtgatgatcgacgacatcagcgaactgacgaaggacagcacccccactgcctcggagagccagcggctggagcctttggggccaggtggagtcagtgggcgtcccgggaaggatcctggggaaccagccgtccttgagggacccactctgccctgctgctatggcagaggtgaggaagaatctgaggaggactcatatgacccccgtgggaaatctggtcatcaccggagcatggagagcaacggccggccaagcacccactattacggtgacagtgactatagacacggggctcgagcagacaagtacggtccaggacccatggggccaaagcatccctctaagagcctggccccagctgccatctcctcaaagcgcagcaagcaccggaagcaaggcatggagcaaaagatctccaagttctcacccatcgaggaggccaaggatgtggaatccgacctggcctcctatcccccgcccaccgtcagcagcagtctgacctctcggggcagaaagttccaggatgaaatcacctatgggctcaagaagaacgtgtacgaacagcagcggtactacggggtgtccagccgcgacgcggcagaggaggatgagcgcatgtacggtagcagcagccggtcccgaatggcgtcggcatacagtggggagaagctgtccagccatgactatagcagccgaggcaaagggtatgaacgggaacgggacactgcagagcgacttcaaaaggcgggctccaagccctcatccctgagcatggcccatggccgggcacggccccccatgaggagccaggcctctgaagaggagagccctgtcagccccttagggcggccccgccccgcagggggcgctcttcctcccggggacacctgcccacagttctgctccagccattccatgcctgacgtccaggaacatgtcaaggacggaccgcgggcccacgcgtataagcgtgaggagggctacatgttggatgattcccactgcgtggtttctgacagcgaagcgtatcacctgggccaggaggagacagactggtttgataagccccgagatgcccgctccgaccggttcaggcaccatgggggccatacagtctcctcctcccagaagcgaggccctgccaggcacagctaccatgactacgatgagccccctgaggagggcctatggcctcatgatgagggtggtccaggccggcatacctcagccaaggaacaccggcaccacagtgaccacgggaggcactcaggccgccacgctggtgaggagccaggacggcgggctgccaaaccgcacgctcgggacatgggtcgccacgaggcccgacctcaccctcaggccagccctgcccctgccatgcagaagaagggtcagcccgggtaccccagctctgctgattattcacagtcgtcccgggctccgtcagcataccaccatgcctctgagagcaaaaagggctcccggcaggcccacactgggccttctgcactgcagccaaaggcagacacccaggctcagccacagatgcaaggtcggcaggcggctccaggaccgcagcagtcgcagccaccatcatccaggcagacaccctcgggcacagcatcacgtcagccacagacacaacagcagcaacagcagcagcagcaacagcagggtcttgggcaacaagccccccagcaggctccatcccaggctcggctacagcctcagagccagccaaccacccggggcacagcccctgctgccagccaaccagcggggaaacctcagccaggccccaccacagccccagggccccagccagcaggaccgccacgtgcagagcaggccagcagctctaaaccacccgcagccaaagcgccccagcagggacgggctcctcaggcgcagacaactccaggacctggacctgcaggggcgaagcctggagccaggcctggagggaccccaggggctcccgctagtcagccaggggcagaaggagagagtgtattctctaagatcctccctggtggggcagcagaacaagctggaaagctgacagaagctgtctctgcttttggcaaaaaattttcctcattctggtgattgtgtccagaagggctcctgaagacctgaagaaagacaatctcattgctgtggaaaaatctctggagtcaaaggcctgggcgcagctctggactctgcgtataacgcatctacaagctggcaaacctttggcccaaagattcccagcaggcgggccccagcaggcaggcctcaaccaagcatgagaatgacatgtgttctcacagcagcgacctaggtgaagcatctgccggaccaatgggaccattggcttgggggacctttcatgtctttcaagagaccctgccttactcaggccagccgtccttgggagcgaggagccctcctcaccagaacgcggttgctgctgttgctgtctgctgctcttcccgcagcctcctgtggcctggccaccaggcttccaatgcgttatacacagagtttgggtgcacactgccctcctctaagatgccagaagttttttccacagccttggagaggggctttgactgagggctggggccctgggctccgattccttcacattccagctggcccggatccctgtgtggccataaggccttgccctcgtcaccctgctctgggggtgacactggagcagacgtccacatggccagcatgggtttgggagaactttacaaacattaggaccctaacactgtctcatcgctgaaacaagaggccatagcaccgaaacgcagcgtgggcaccggctgaggcttctcccagcccgtggatggcagcgtaactaggcatgcctgccatcaccttaaagccatccccccagccattgtgagcaccccagcagcaccgccattgtctcgaccagccggctcctcggctcctcatctctacacctgaggatttcttttgatttcaggaacagccttaatcattccagtttgatttacatgtatacctcatgaacatttttttgttgttgttgttttatttttctttctctccctttcttttctttgcttttatccctttgtctctcccccaccccacccccaccccgcaacctcgtgactgatggtttggtttcctctctgctctgcccctgctcagcacagggagaaacgttgatttagaagcaatagcgggcagcaggccaccaagagcacaaacccagggcgaggtctagggaggctcctcagcccgcctgtttactgtcttcttaagccatcagcagtgggtgtgctcagagcagaggagccaagggagagcttcagagacctgtgaggtaaggggagtataacaccgtccattcacctcgtggactgggctacatgcctccccaaagcccttccctgggaggcctcccttcatctcgggcccagccacaagtctcatctctaatgttctatgcaatgaaatataaaccctcaaagacaactgttaatatttaataaattccgtgttacatataaggagttaattgcaaacatgcagttgagaaactggatagctctatctgctcataccatcaccccaacccaatccttgtccccacattctgtgtgtgtgagagagaaatggagagcgtgagtgcgtgtgtgcgtgcgtgcgtgcgtgcgtgcgtgcgtgcgtgtgtgtgtgtgtgtgtgtgtgtgtatgcgcgtgtgcaggtgtgcatgtgtaaattttaagtctgtggcatgtttgacctgtggcaggactcgctgcttgccaggtgagtcgccgcctgtctggcactggagcatgcacggctcgaagcttctttgcacgatttcattcattttaaatgcccgacctcttgcttggagttcttttcgcctccaaacctctcctttaggagcgcttctccctgactttgggacacgctagtaaagacctgccagaactgcctacatttgccaggccagggagcaggcagtgaggccccagacaccttgcagtttttatctgtgtacaatagcagataaaaacaaaccttagactagacagagaggggagcccgcacaggatgcatgtgtatggacattctgtgggtttgctgtaggatttctacttgtatatcatttttcctcctatcccaggcctgagccaaaagaaactggtcacatcttcccagtggggtactgctcaagggcaaagcttggggcacatctgtggagaggcagaagccaagggatcctggctgtgccctatgattcccagatcttgactgactctgctctatgtctctcctttgtgatgaagaagcttaaaggattgtgagccaagagatctatctggagtggag

SEQ ID NO: 2434 - protein, 3896 aa, Mus musculus
WAWAWRPARAKGPLPPGGSGLGPGPGAGKPPSAGGGQLPVAGAARAAGPPTPGLGPVPGPGPGPGPGSVPRRLDPKEPLGSQRTTSPTPKQASATAPGRESPRETRAQGPSGQEAESPRRTLQVDSRTQRSGRSPSVSPDRGSTPTSPYSVPQIAPLPSSTLCPICKTSDLTSTPSQPNFNTCTQCHNKVCNQCGFNPNPHLTQVKEWLCLNCQMQRALGMDMTTAPRSKSQQQLHSPALSPAHSPAKQPLGKPEQERSPRGPGATQSGPRQAEAARATSVPGPTQATAPPEVGRVSPQPPLSTKPSTAEPRPPAGEAQGKSATTVPSGLGAGEQTQEGLTGKLFGLGASLLTQASTLMSVQPEADTQGQPSPSKGQPKIVFSDASKEAGPRPPGSGPGPGPTPGAKTEPGARMGPGSGPGAKTGGTDKHGRAEHQAASKAAAKPKTMPKERASACPLCQAELNMGSRGPANYNTCTACKLQVCNLCGFNPTPHLVEKTEWLCLNCQTKRLLEGSLGEPAPLPLPTPQQPPAGVPHRAAGAAPLKQKGPQGLGQPSGSLPAKDQATKDQATKDQATKDQTTKDQAKPLRATEPSKTSSSAQEKKTVTSAKAEPVPKPPPETTVPPGTPKAKSGVKRTDPATPVVKPVPEAPKGGEAEEPVPKPYSQDLSRSPQSLSDTGYSSDGVSSSQSEITGVVQQEVEQLDSAGVTGPRPPSPSELHKVGSSLRPSLEAQAVAPSAEWSKPPRSSSSAVEDQKRRPHSLSITPEAFDSDEELGDIEDDSLAWGRQREQQDTAESSDDFGSQLRHDYVEDSSEGGLSPLPPQPPARADMTDEEFMRRQIMSAEEDNLEEDDTAVSGRGLAKHSAQKASARPRPESSQEPKRRLPHNATTGYEELLSEAGPAEPTDSSGALQGGLRRFKTIELNSTGSYGHELDLGQGPDPNLDREPELEMESLTGSPEDRSRGEHSSTLPASTPSYTSGTSPTSLSSLEEDSDSSPSRRQRLEEAKQQRKARHRSHGPLLPTIEDSSEEEELREEEELLREQEKMREVEQQRIRSTARKTRRDKEELRAQRRRERSKTPPSNLSPIEDDTEELRQAAEMEELHRSSCSEYSPSPSLDSEAETLDGGPTRLYKSGSEYNLPAFMSKPTETPSGSSTTPSSGRPLKSAEEAYEDMMRKAEMLQRQQGQVAGRPHGGPSQPTGPRSQGSFEYQDTQDHDYGGRASQPVAESTPAGLGAAVYEEILQTSQSIARMRQASSRDLGFTEDKKKEKQFLNAESAYMDPMKQNGGPLTPGTSPTQLAAPVSFSTSTSSDSSGGRVIPDVRVTQHFAKEPQDPLKLHSSPVSSTLTSKEVGMTFSQGPGSPATTDTRGYMTPTSPAGSSPSTSSTIHSYGQPPTTANYGSQTEELPHAPSGPPGSGRAPREKPLSGGDSEVGAPQPSRGYSYFTGSSPPLSPSTPSESPTFSPGKLGPRATAEFSTQTPSLTLSSDIPRSPGPPSPMVAQGTQTPHRPSTPRLVWQQSSQEAPIMVITLASDASSQTRMVHASASTSPLCSPTDSQPTSHSYSQTTPPSASQMPSEPAGPPGFPRAPSAGTDGPLALYGWGALPAENISLCRISSVPGTSRVEPGPRPPGTAVVDLRTAVKPTPIILTDQGMDLTSLAVEARKYGLALDPVSGRQSTAVQPLVINLNAQEQTHTFLATATTVSITMASSVLMAQQKQPVVYGDPFQSRLDFGQGSGSPVCLAQVKQVEQAVQTAPYRGGPRGRPREAKFARYNLPNQVTPLARRDILITQMGTAQGVGLKPGPVPEPGAEPHRATPAELRSHAPPGTRKPHTVVVQMGEGTAGTVTTLLPEEPAGALDLTGMRPESQLACCDMVYKFPFGSSCTGTFHPAPSAPDKSVTDTALPGQSSGPFYSPRDPEPPEPLTFRTQGVVGPGFEQRPYPQGLPGRKSMSDTNLAEAQYHAQRLGQLFQGPGRDSAVDLSSLKHSYSLGFADGRYLGQGLQYGSFTDLRHPTDLLSHPLPLRRYSSVSNIYSDHRYGPRGDAVGFQEASLAQYSATTAREISRMCAALNSMDQYGGRHGSGSGGPDLVQYQPQHGPGLSAPQGLAPLRSGLLGNPTYPEGQPSPGNLAQYGPAASQATAVRQLLPSTATVRAADGMIYSTINTPIAATLPITTQPASVLRPMVRGGMYRPYVSGGVTAVPLTSLTRVPMIAPRVPLGPAGRYPAPRFPIASSVPPAEGPVYLGKPAAAKASGAGGPPRPELPAGVAREEPFSTTAPAVIKEAPVAPAPGPAPAPPPGQKPAGEAVAGSGSGVLSRPASEKEEASQEDRQRKQQEQLLQLERERVELEKLRQLRLQEELERERVELQRHREEEQLLVQRELQELQTIKQHVLQQQQEERQAQFALQREQLAQQRLQLEQIQQLQQQLQLQLEEQKQRQKAPFPATCEAPSRGPPPAATELAQNGQYWPPLTHAAFIAVAGTEGPGQPREPVLHRGLPSSASDMSLQTEEQWEAGRSGIKKRHSMPRLRDACEPESGPDPSTVRRIADSSVQTDDEEGEGRYLVTRRRRTRRSADCSVQTDDEDNADWEQPVRRRRSRLSRHSDSGSDSKHDATASSSTTAAATARAMSSVGIQTISDCSVQTEPEQLPRVSPAIHITAATDPKVEIVRYISAPEKTGRGESLACQTEPDGQAQGVAGPQLIGPTAISPYLPGIQIVTPGALGRFEKKKPDPLEIGYQAHLPPESLSQLVSRQPPKSPQVKPVSPLSPHRLLDTSFASSLNKAHVSPQKQFIADSTLRQQTLPRPMKTLQRSLSDPKPLSPTAEESAKERFSLYQHQGGLGSQVSALPPNGLVRKVKRTLPSPPPEEAHLPLAGQVPSQLYAASLLQRGLAGPTTVPATKASLLRELDRDLRLVEHESTKLRKKQAELDEEEKEIDAKLKYLELGITQRKESLAKDRGGRDYPPLRGLGEHRDYLSDSELNQLRLQGCTTPAGQYVDYPASAAVPATPSGPTAFQQPRFPPAAPQYTAGSSGPTQNGFPAHQAPTYTGPSTYPAPTYPPGTGYPAEPGLPSQPAFHPTGHYAAPTPMPTTQSAPFPVQADSRAAHQKPRQTSLADLEQKVPTNYEVIGSPAVTMSSAPPETGYSGPAVSGSYEQGKAPEHPRGSDRSSVSQSPAPTYPSDSHYTSLEQNVPRNYVMIDDISELTKDSTPTASESQRLEPLGPGGVSGRPGKDPGEPAVLEGPTLPCCYGRGEEESEEDSYDPRGKSGHHRSMESNGRPSTHYYGDSDYRHGARADKYGPGPMGPKHPSKSLAPAAISSKRSKHRKQGMEQKISKFSPIEEAKDVESDLASYPPPTVSSSLTSRGRKFQDEITYGLKKNVYEQQRYYGVSSRDAAEEDERMYGSSSRSRMASAYSGEKLSSHDYSSRGKGYERERDTAERLQKAGSKPSSLSMAHGRARPPMRSQASEEESPVSPLGRPRPAGGALPPGDTCPQFCSSHSMPDVQEHVKDGPRAHAYKREEGYMLDDSHCVVSDSEAYHLGQEETDWFDKPRDARSDRFRHHGGHTVSSSQKRGPARHSYHDYDEPPEEGLWPHDEGGPGRHTSAKEHRHHSDHGRHSGRHAGEEPGRRAAKPHARDMGRHEARPHPQDAPAMQKKGQPGYPSSADYSQSSRAPSAYHHASESKKGSRQAHTGPSALQPKADTQAQPQMQGRQAAPGPQQSQPPSSRQTPSGTASRQPQTQQQQQQQQQQQGLGQQAPQQAPSQARLQPQSQPTTRGTAPAASQPAGKPQPGPTTAPGPQPAGPPRAEQASSSKPPAAKAPQQGRAPQAQTTPGPGPAGAKPGARPGGTPGAPASQPGAEGESVFSKILPGGAAEQAGKLTEAVSAFGKKFSSFW

SEQ ID NO: 2435 - DNA, 137143 bp, Homo sapiens
ccttttatgagatatggctgcaggaaacttttgcagactgcactccatctcaaatgtcctttttttcttttgttctttgtctccttctagtaccactcttccccttacttaaaccataccttgcagctgtcttacaacttactaaaacaggccaacttaggctccacagaactctgttgggtctgcatgccccctttgttcccaatataccattatctccctggacctttagaagcctggaccaattccttggcaaccctcaccattactaaaactaccttaggatctgcattctgggaaccaagtactgatcctgccacagccatagccaaaaaggtgcatcaggccgttctcaaacaactaaaaactttatcccctatccaaagcctcatggttacaggacctataggaaccaccactccactcactactcaggcccctatatgtttcacctgctccttaaacagagttccagaagggtctttaaaatgctcggactgtaacctgcctctttctctctctcacacaacagattgtagttattcctctacaacaggagcaagtgacccattctcatcagtgacccaactcatcagccaaagccacgccctcttaccccttaagattttctctccctatatgtagtaatgcttatgaatgtaaccaagagtcagattttttttgtttttgacacggagtcttgctctgctgcccagacttgagtgcagtggtgagatctcggctcactgcaacctccgcctcccaggttcaagcaattctcctgcctcagactcccaagtaactgggatttcaggcacccactaccactcctggctaatttttgtatttttagtagagatggggtttcaccatgttggctaggctggttttgaactcctgacctcaagtgattcacccacctcggtctcccaaagtgctgggattacaggcgtgagccactgcacccagcctcaagggtcagatttttgcagtgggtgagggccagctaatacattgcctttattcaatatctatggtagacatgaaaaatccaaatgccaacttcttcccctcccgggtccaacccaattctttcttgattcatctgaacacagactattctcagaaatacctttggtaactcattacccccttctccaactattaaccgatgaccacctagcttcctcttttgtgtcatttgaatgggaaggaggatcaggtcgggatgcctcaaactaccacatattatttcaagcagatgttgctgcctgtgtagccccctccagcccttatttcttctcatgtggacataatttctacaactgcctgtctgttaattggactggaacttgcactttagcttagttatgcctcccttgtctgttgccacaaaagaccaagaatttctcctgccactacacacacaaacacacacacacacacacacacacacacacacacacacaccccaaaacaaaaagggcaatccaggtaattccaatcctcgctgctctcggaatctcttctgcaataggctttagttccacaactttatagctttttcagtttccctgtctagccaactaaaagagggactaatggaaatagcaactcaactggatcacatacaagatcaaataaactcccttgcagcagtagtacttcaaaaccataggggactagacatcctcactgcaaaaaagggaggtctatgcctcttcctgcaagaagaatgctttttctttcctttttttttttttttttttgagacaaagttttgctcgttgcccaggctggagtgcaatggcatgatctcagctcaccgcaacctctgcctcctgggttcaagcaattctcctgcctcagcctcccaagtagctgggatttcaggcatgagccaccacgctgggctaattttgtatttttagtagagatggggtttctccatgttggtcaggctggtctcaaactcccgacctcaggtgatctgcctgcctcggcctcccaaaatgctgggattacaggcgtgagccaccgcgcccagccaagaatgctgtttctttacaaacaaatctagattggtaaaagaaggaatatccaaacttagaaagattgcagaacgtctacgcaaacaacccgccaatgactttttcagttctttcctcccttgggtactccctttcatcagtcctttcattgtttttaccctgcttgataaattgttgtctttttgtttttttttttgagatggagtcttgctctgtcccccaggctggagtgcagtggcccgatcttggctcactgcaagctctgtctcccgggttcacgccattctcctgcctcagcctcccaagtagctgggactacaggcacctgccaccatgcccggctagttatttgtatttttagtagagatggggtttctccgtgttagccaggatggtctcgatctcctgacctcgtgatccacccgcctcggcctcccaaagtgctgggattacaggcatgagccactgcgcccggccactaaattgttttcaaaagttcattttagaaagagttacttcaattgctcaggccaccacaatgggacatataaaggtggcattcctgccacagaaagagtgaatgacttcatcaccagaggaaggctacctccccccacaccatcacccctaaaccagcaggaagcagtcagaacgagtagctacccctctgctaaaaaccctatccaaagagataattaaaacaaagagggggagaatatgaggactaacaatagttatgccattttacaaccttggctactgtgttctcagaagcaaagcaaatgtcaaccctgcctatagcttcaacagagcataacagccctaactacatctacccccagctggaaaagtccgcaacagtcccagccagccagcacttccccaacccctccccagtagaaactttattataaaagcctcagcttgtaatcgatcagggtctcaggcagactcctgactgggacgcctcgcaggcttattcctgtaaataaacctgtttggctgttgagtttcctcctgtctcttgctctcttcctatgcatcttcctaacagtttcctgggggatgctgaagatgtgtattcctggacttctttgaggagcacatggtatgcttggggcagggggtaactctgccttcctgtgtccaaagtaatgattagaatgcatatgagaggctgaaaaggtactgagtgtgaccccagtggctctgactcagcaatcactgtgccccaaaccctgccctgggttcaggcagcacatgagcttactcctggaactccatcctcctcagagaggctcatgatcatgcagggctaggagacgaatgtgccaaccctgtgagccccaagaagatccctggagcagagctggagatggaaggtgggcctggttggaatctcagctgaatatgtgacctttcttgttctcttggtagcagatgatgtcccttgcccagccttaaaaggaattttcagtctgtactgtcagctcattgtcagaaagactgccttctcagaaagctgatgtccatgccaggccttccagctggaggggttttttaatacatacatagctgtggtaacccagatgtggctacctgactgatacctgctaccacccagcccagaacctggaggagccaagaggggttctcctcagacaaccctgatgcctgagtatgattttagtgctcatggcctggcctggtgatgctgtgactacacccaccactatagggcagggtagtggtcctgtactgagggccagaagtcaagctctccaggttcagggcctggtttgagcagcagacaggcaaagaccagacttcgagatcacaagctcagtgagggcagaagagtttagcagtcttggtttctgctgtatcctgtgggcctggcacagtgctgtcctcatcctagagctcaaaaagtgccaattttttgtttgtgagacagagtctcactctattgcccaagctggagtgcagtggcacgatctcagctcgctgcaacctctgcctgccagtctcaagtgatcctcccgcctcagcctcctgagtagctgtgactacaggcttatgccaccacacctggctaattttgtattttttgtagagatgggtttcactatgttgttaggctggtcttgaactcctgggctcaagccatttgcccacctcagcctcccaaattactggaattacaggcatgagccaccgtgtctggcactatggacctttctccttgccacaaggctcttgcttcactatcagggactcattccctaccccattctatctttcctggaaggcagaagcttttccagtggcttctgggagctccctgggcacttggtaaagatgatagaacaaacaagcccctactacaatccattctgattaggacagagatagagctcagtggagagagtggctatgtcccgtggcctgagattcctgatggtaaagggtgattctcagaagtgtccttgggtttgcagtagaagagccacagaggagtcgggaggtaaggacctctctgagagacttccctaaagacatgcagaactgagtctgatggaggggctgagcaagctgctctttcccatgagcagtcagagtcatgcctgaaccactgttggctggggtaggacatgtgggctggtcaggagagggcataagtgcatgactttccacccgggcctgttctcccccaatctatgaaacagacatgggtgggggacatgatcacaatagagattctggtgacattttctgtagtttattggaaataatttgtgtgcctatcactctcttcctgcaaacagaactcctcaagggcaggtctcacagtcttctccaggcctggcactgagtaggagtcaggtatgcactggccaaaggaggatgactgcctgcatgcatgagataggcaaagccagcccagaggcttgtctaggggaacacaaaggaacaagggatgcaggatgtttttttcttttttttttgagatggagtcttgctctgacgcccagggtacagtgcagtggtgtgatctcggctcattgcaacctccgcctcccggtttcaagcgattctcctgcctcagcttcctgagtagctgggagtacaggcgcccgccaccatgcctggctaatttttgtatttttagtagagacggggtttcatcatcttggcaaggctggtctcgaactcctgacctcgtgatccggctgccttggcctcccgaagtgctgggattacaggcgtgagccaccacactcgcctgggatgcagtatgttttgacttggatgcttatgacttggaggaaccatgtcttcattattttttcttgtcataacaagccttcagaatcatgtaactctaatagcaatgggccttaattagctttcttgggagcaatgcatgggcagtggggttaggctggtggcaaacatttctgacaattttttaccgcctttttttcatataatgcaagcaaagagttgccagttgcaacagcaaaggaattatgtaggcaaggcatcaagcaaattctgtaccttccagccttattcctttctcctgctttaccaagggccatggccagcttaagacctcagtatacaattgaggttgtccaggccagcccaggtaggctgctgagcagaacgaagatacaatcacttgtttgtagcctcatgccagcttaaggctcgcttagggaaccaccttattctctatgttagtgggcagtgccaacaaatctcagccaggaaagaaagcctctgtttctttgggcttccttccttcctcttcagttctgtttctctctcccaaagaaggagtggggcaggaagccaatttcctgagttgcttttcattgggaagtgagacaggcctcagcagcactttagcaaaaagaagggtgcagagttcaaggagccttgtaggcaggagacaggtctctcagcctctctggaatagtccaaagtccatggcattatatcctctagatacagcctgtcctgtgtcatccttctctattgtcttcctcctctgatctctctaatgcctactcttgcctgcaaagtttgccattcttcttcacccccatagacatcttcatctttggatctcgtgcctccccacggaggctgccatgctgaaaggatcagcccagggtaaactggacttatggggaagcagggaagagtctgagctctaccccttctccctttcttggggatgaccggcatgatgctttgcctacggcacaactacacctctgggtgtagttcctgaggtcctgtcatctcttcattcttccacgatttgccttctggtgactaatcatttctactaatcccagcagtgagttggctctgattgggccttttcccacatggatttttttgtttagttttgtttttttgagacagggtcttgctctgtcacccaggtgggagtgcagtggcaccatcacagctcactgcagcttcaacctcccaggctcaggtgatcctcccacctcagcctcccgagtagctgggactacaggtgcatgccaccacacccagctagtttttgtatttagtagagaaagggtttcgccatgttgcccaggctggtcttaaactgctgagctcaagcaatccacctgccttggcctcccaaactgttgggattacaggagtgagccactgtgcatggccctggatggctttttgttgttgttgctgttttttctgattccattttccctctggtcttctacaagtgtctgagaacataggctggagaagcaagctggcacatgtctgttggttccatttaggcatgtggattgattgtcctctcatctggccatctccaaaatggctgccatgtgtcacatgttatgctgaagtgggaagaagatatttcagcaagtgaagcttaggggactgggaaactcctgcagggtctctaggtctatcctgtccctggtggggcagcagttggacccaggaggacatgatacttgacacaccacacagctggcttgcataaactgaaagatttgtttattcatttgtcataaagcatagtcaagcctagtgaattttcctggatgagtgaagagagctcatcaacaacccctccatgaggagaaaccagatgcaatcccagcactctccctgttacttattagctcagcagctaaagccaaagatctctctgagtgcttttaagcctggtgattggtgggccctttagaagcgcaggtgagggaaatgctcagagcgtcatggagaagccagcacaaccatgagccccagagggcctgctgaaggccagcccaggggataggaccagtcagacaaggtcctgctgttgaggagccccagtctagatcaaaaggaggtaaacagcctctgggacagtgaatggaaatgggagattgaatcagagccccagataaccagaggccaataccatcccatggtccacaagagtccctgggctgaatgtcaagggtgaatgaacacagggcaggcatgttcctggggatgctcctcaaaggaaacagaactgggagagtttgagaggagaggaggggcacctctaacccacattttcaggtctcctgggtccactgtgctgtgccctttgtcaccagggcagcaaagaccctggaggtctgctaacagccaggaatccactctgaggagggcaactccccaagcctgcaggctgggtagagctaattaaccacacaggaaccagaggcatgttgatttaaatctgtggaaagccatagctcctgtggtttctacaaaaacaaaaaaataaacatcctttcccctgtttcaagtagcccaacccacactgactggggtctgtgaagctataacagcctgggttgggacaaggtcaggccactggcctgcccatagtgtttgtgagcatattcttccccaggaggaaatatatggcacaagaccgccacatcccagaccatcaccagggagacaactaataacagagttgtcataagtataccaggcacttgtcctggtgttttacctacatcaggctgggtgcattgactcatgcctgtaatcccagcactttgggaggccgaggtgggaggatcaccagaggtcaggagttcaagaccaacctggccaacatggtgaaatcccatctctactaaaaatacaaaaactagccaggtgtggtggtgggcacctgtaatcccagctactagggaggctgaggcaggagaatcatttgaatccgggaggtggaggttgcagtgagccgagatcacaccactgtactccagcctgggtgacagagcgagagtctgtctccaaaaaataaaaataaaaaaaataaaatgaataaaaaataaaatatctacatcagccactctacccttacaatcccccatattcgaggagctactaagattctaactttgcagaataggaaatggaggctcagtgagcctaagtcagttgccaagggtcctatcggggctgaggtgcagactcttttggagcctaaatgtgcacatgtagtcaccactcacgaagctgtatcaaacatcctgcagcacaggaggaaacacagcaaggaccatcatctgcaggaagagaggctctcttcatcctaggtcatcccagaggggccaggcagtttagcgtgaaaacgggaggtatgaagtcaggagaaaatatcaggaagtgggggctctgcatttcctctttctcttacttgctccatcccagaggtcgggaggagcagctcggagtgcacaggggaaggcccagggagggtcctggcccctcctcacaagaactgacacagccaccggtctgtccagcaggctggctatcagcattcactgggatccctggattattctaggttcagttagaactgctaacaccctatgtgatatatttcgcaacattaggagaattgaatgggtttgtaaaatgggttcaagttactcacgcctttctacacagtcatgatttatgacgtcagagatgaactggaatataggctcctaggaaatattctcccacaggaaagtacaggcttgtgtgagaagccaccacggcagacaatcctgagtagcgggcagaaaccggctgtaaatgtgagggagcggggaagtaatttggaaagctctcagggtaatgcagaggcaacctgcggccccgcatcgagacagctccaggcctgagaaccatcaagtcctcttttccatccccaaggtcactctcccagggctgactgaggtggcctcccagctggcttcacacagccctgtcacaccttccatctgtgcccggggcgcttcctgagactcccagttcctcagtgtgaatcccagatggttcccatcgccatctggataaaggctccactccccagctggccttaaagaccctcacaatccggcccgaccacccagcaccctccctctccttccctctacgaccttgcgtctctgaatacacttgttcctctgccttcccaactcctatgcatacttttgaggccattctcgggtagcccctctcctctccgaggcctgtccttatgacgcctgcccgctgtggcactccggttacccggaggagagttgctactctcgagttcaccgaggcggaaagcccctctgactccaaagcagggctcagcgcgacgtcccagaggccgcttctagtggcaggtgcccctcctcacagggccctcgcagccccgccggcccccgcccggctccttctcagcatgatacaaccgcgtcggccctggacagcgcatgcgcgggcgccggcggctgtttcccagcgaccccgaggctggcgggagcgcgcacaggggaaggggggcgtgtgcagggaagggggcgcgagacgcgcatgcgcagcggcaggcggcggcgcgagccgagctgggagatggcggcggcagcggcggcgccgagagtgtgagcaccgcccgggagccgccggcccgggcgcagcgcgaccccgaccccgcccgcccgcctgcccgccatgggcaacgaggtcagcctggagggcggcgctggcgacgggccgctgccgcccggcggcgccggccccggcccgggccccggccccggccccggcgcaggaaagccgccttcagcaccggccggtggcggacagctccccgcggcgggagcagcgcggtcgaccgcggtaccaccggtccctggccccggccccggccccggtcccggccctggcccgggcaggtaagcgcgtgtctcggcgcccggggggcggtgagctgcagcctgaggccgggacccgggcccaggatcccgcgatctagtgtggacagcgaggttcgacgtccggccgcactctgaaccctgccggattggcgtgaactgggtggtcgcgggaagcggcccttcctttccagctgccccgccttggcgtggcaggatgacgagcgcagggtcagtcggggcctgcagaccgtgactccgtcacgaaccccaaattcgcttctccccaacgctcgggcctgactgctcaggaggggcttatgtaaccttaacctggtccctccgcacaggagagcaatgggatggaaaacgtcctccctgtctgctggtgtctgcatgtgtccattgtgctgggccgagaaaacagcacaatgggagtggctgtcagggaagataagtgtcactgcgaggaacagagagatgaaaatagttgaaccatgaacttggtcttgggctttccttgggcatttagtggctgtaatcacctttgggggaaaggaaaattgcccactggacaccaagaggtgcttatttaggcccaacaatactaataggatcatgtgctttcaccaaggtttagggaaacattttggggtgaagcaaaaatgctattgagtcatccagcaccagatatgttctcgttaccttatgatttagatcaaaccagtggaaaagctgaaacccacacagaatgctttaaacagaacatatctgattaaatactgtgaaaccagtttgttttaaatgtatgccaacccaggtcctgcaaaaacagtcaagtggcaatgaaggctgtaagggaatgccaatatataataagtcagtagactgaaaactcaggaaaactactaagagatgacacgataaaatggaaggcattatctttgcaccaaataggcttggggagtagcaaaacccccagggggtgggagggaggtgcttccagctccatgtgggtctgctgatatatgttgccctggcttttctgtgtggaagcacataaactgaggacgcataattttttattctttggctgcccgactgtgcctcttgtgtgtttatttcctcagaagtcatttcttagacaactaacagtaatgaaaggctgttagtagcttgaaacctgcggcagacaggtcagcctgtgagcatcctttttagaggtgggatttgtccattttatactagctataatagtaatgcagttggatagcacacagctcttagcactgcaaacactgtccattttgctgcatgttgagttgctgtttgggttttagcttgagggaggctcacccaggctttagtgttctccttccaagggaaagcttctgtagctgaatggaaaaacaccttgttattgagagttccctgtatggggaatttgtcatttctcttctgataaccaaacaggctgctctgcttgtagtttatcagatgttgcagagccaatcatatgaaattctggaaagacctgggcagctcagagggaccggaaggaggctgatgtctattgctcatatgcctttttagtgtttcatttgtacttcatctgtacattctgctgcaggcagacccatgaactgctgtgggtgaggcgaaccacggactcctgatggatttagtagtcacacaatctcttacctggctgtgggcaaggctcatacctgagcctgtggtgctgaggtcctgtgactatcagactcaggaggtgagctggctatttgtccccaaagctcagaaccagagaccattaggaggtgggatttactcctccagctgatattcattttatcatagcacctcagctgagcagcagctccatggcttatctctcctttagtattgcaatggcttctacttcctctcactagagcatctcagatacctgatgccaaatttagcatgttctaagatgctgctgaacagattggcccattgatggggaaaaagccctgtgaatgtgcttctgggcattcaggaaagagcattagcacaaagacatatttgctttcagtaagattttgaatttcggggcagtcagaaacctcatagaggtgggtagaaggccaggtaaaagggagatgattctgggggagttaaatgctattgccatattaccttgtcatcccaggctgaattagtcttttcatcctcatactgagctgagttggactctgtgagggggtggctccagcatttgctgctgaagagcctgacttgaatcccatgagtagcagtgctgccacacccatagtggtgcctcttagcccgtcgggatgatgtggagctttgggcattggagagtccctcaaggaagggctctctgcttctggtgtcagggtggccatgtacaattatataatctgtgccttttccaaggagtgctggtttgggagaaagctgaactctaacccaggctccactctccaagctgtgtgccctggtgtaggctgcatcctcttagatgaaggggcatcattcactcgttaattcatttacttatttatggagatatgcctaatgtacagtggaacacacatattgatgggattttatttatacatacactcgtgacacactaccagatcaagacagaactttatcagtaccccagaaagtactttttaaaataattacacgaaggagccatgtagaccagtggcagcctgtctagtttacaccagctctgtggacttgcacctgtcagttttttttttttttttttttgagttggagtctcgctctgtcgcccaggctggagtgcagtggcacgatctccgctcactgcaagctccaccttctgggttcacgccattctcctgcctcagcctcccgagtagctgggactgcaggcgcccaccaccgcacccagctaattttttgtacttttagtagagatgggatttcaccgtggtctcgatctcctaaccttgtgatctacctgcctcggcctcccaaagtgctgggattacaggcgggagccactgcacccggcccaacttgcacatgttttgatgtttgcaaattgatatctagtcgatcagctaaggtgtatttgtcagctgtcaagagcaagcacagttattggctttgtggatggtatggaaaggatatatagtgcttccctgtccttcagcacctcacagactggttggtcagatagctcttgaagagccaaatcatggaagaaccctaagagagacactgtgggcagctcagtatctgagaaatgtcaaataagcagtgcttacagggttgttaattgggaagagtggagaggcacagctaagctttaggagaggtagagatgtaaggctggaaaaatgactgggttaagagaggtagagatagagataaatggcataaagaatgtggtctacacaggcagggacagtgagcagagaatgaggctgagtgcagggtggtgggggaaagccagggcaaagccaacagaggcccttctccatcattgcccatcagaatgcgtaatcaatgccaaagtcgcctctcttcactcctggcccatatgttattgagacagacaccctaagccaaaggcagctaggcacagagaacctggttgtttactggaaggtgggcaaggctgctctgagaaccataccccgaattcctttttcaaaatggatttgtcaggcatagtatctctggtctgggattagtcagacttgttacattatatcagccaactcagcctctagaaaaatctggcactaacttgtaaagataaaatgaaaggacataattgccaggtctggaaataatgctcctttgtcacttagagatcttctttgtccccagtggctggatctcacagagggtatgtcatggagtgtgaattaaagtgaccttacatctgaatggtgacgatgtcaaaattttacccagagggcaaccatttttgcatttctccagggaaagcaggctacttttgataatacagttgctcacagcatcattaagactaataaggtgctgttgatttaaaaaatgtaaaaatgtaatggagacattaggaggagaaatactgtcttttgtttgtttgttttttgttttttgagacagagtcttgctctgtcgcccaggctggagtgcagtggcgcgatctcgggtcactgcaacctctgcctcccgggttcaagcgattctcctgcctcagcctcctgagtagctggtattacaggcacccaccaccagacccagctaatttttgtatttttagtagagacggggtttcaccatgttggccaggctggtctcaaactcctgagctcaggtgatctgcccgcctcagcctcccaaagtgctgggattacaggcatgagccactgtgcctggccgagaaatgctatcttaaacattttttttttactatggaaaatttcaaacatacatgaaagtagaggaaatggtctaatgaacttttgtgttcccattgcttagccactgccatcatcaacttatggccaattgagtttaatttatctctctcacatcctaccccctagagaagcaaattccagacatcccaaaatttcatcatcagtatttcagtttgtatttccaagaaataagggctttgcatgaacataaccacagcaccacagccacatctaaataagataatgatctcttcttaaactcagcaaatattcagtcaggattctacttttctgattgtcttatgaatttacttttattattggtttgaattgtgatctaaacagggtctacacattgaatttgtctgatgcatctgtctagtttctttatgtattttctctcctttttgctccttgcagtttattattagagaactatgacatttgtcctgtggtttctcatattcaggattatgctgattgcatccctgtggtgtcatttaagatgttcctctgtcccatgtttttcttgtaaactgagaattctgtctagaagctaatcagattcaaattttattcttttggtcaagaaattctagctttttaaaaaagagtttattgaaggcttcagacatggagaggctgagagttcactgaaagcagaaccagggtttgggctaattgggagccaaagaacaatgcagtggaccacttttctgttccttttctaaagatctccttcctctgagtcagtttggttctgagtttaagaagtcaaagctttcagaggaaagttgttttttttttcccccagaaaagtcatgcctttcaccccagtgtgggggagccctccctgcatatgtgagtaggaagcctcctactcacatttgggggcttaataaatctttccccttatcacaggtcctgcatttctgaattgggccctttcctcttgttagttgtgggggtgtggaaggccagacctactatgtgtgggctatgtgaggggaacctgttgctggagcctgtgggccatgtgcagtaagttggggctaactgtgaaggtaggttggcaacactgtaatagcagttatgactaccattactgaatgactgcctcatcacagacattctgctaggtgttttatttcttattccacctgcttggccattcagcttctgcaggccctgcctgtcctgactttacttactgcctggggactgactttttaaatggtaaaatggtggctaagccctgcatgcctacagcaagggctgactgtcactttaggacatgaggccctctgggtaagctgggacttggtgaacaatctagctgtgggggactcctgctcagtccttccatttggtgccaggagcatgtcatgctggtattgatcctgcatttgtagcacttgcccgagctccttttctggagggacctctgccatctcctctcactagcacagtggttgaagctgtggagtgaattgggacactggcctgtgggctcctgcctgtggtaggggtgatagaattttggtgtctcactctctgtggttccttctgtacagatcgggcttctagtgggggtctgttgccccctagcattctcttggcccatttgtcttatattttaggttctggtcagctctgctgtggaatgggatactccctgacacatctgtgttgtgccttgggctcccaggctggccacagggctgctgtgatctctccttcctattattcgtctttacgggcacatagggttctaaagagagctttgctctagcagagacctggggcccctacttctttctaacaagagggtcacatggaggcacatgggaagcctccagggagctctagatcaccccaggatcagatcaaatcttgaatggcctggagaggcctggttgcccctaaagtgggtgaggctgctgtcagggccaacggtgaagaagagattttccctgaggggaaatagaagggatggcttttggatcttggtcccaaacactgaggagatccaagagcctcagcagcaaggatcaccccacccagtcctatctgggactaacccctgtatccagaggagcccgagctcttcaatgccactggcttgtgtggggagccaaacctcccaaagatgctggaagaaccattaaggcatttgggttcttgggagaaagggtaggtgaggaaatttcctaatagttacactgttacatttgtgtttgcaggcaggtaacaagggtcactcccattaaaaaaatttttttaattaattatttaaattgacaaaaattatgcactatatatttattatatacaacctgatgttttgaaatatgtacatattatgacatattatggaatggctaagtcaagtgaattaacatagtcatgacttaacatacttaccatttttgtggtgaggatgcttaaaatctattagcagaaatttacaagaatgcaatacattggtgttagctatagtcaccgtgttgtacagtagatctcttgttgttgttattttttcttttcttttttttttgagacaaagtctcactctgtcgcccaggctggagtgcagtggcgtgatctcagctcactgcaacctctgcctcttgggatcaagtgattctcatgtctcagcctcccgagtagctgggattacaagtgtgtgccaccatgcccgtctaatttttgcatctttagtagagactgggtttcaccatgttagccaggctggtcttgaactcctggcctcaagtgatccatctgcctcagcctcccaaagtgctgagattgcaggtgtgagccagccaccatgcccagcctagatctcttgaatttattcctcctatctaactgaaacatctcctcaaccttcccttctacctcctactgtgtcacctacacttttttgtgtatgggagtgtttgtggggatttttacagttagattctacatagaaatggaacaattttaaagtgaaattttatccatgtattcaggaaactctgctgaacatcttttggatacctatccctgggtgaagtgtgaggaataaaagaaggagcataaaataggctctgccctaaaggggcccatggtgtggggagagagaactcttgtccagatctttagcctcaacttcttcttccttaaattagagtttgctcctgccttctctttgtctcacagaggtaagagaaatgagagtatgattaaaaggggttgcattatttcatgttctaaaatagtagagcatatatttgtatggtattttacagcttacaaaacacattcataacattcacgtattctgttgggaagctccaaaggcctaagaggagtgatgtagaagaacagccagctagcagactttagcaaaccaaaatgccgaatgctgtggagaactgtgtcacttccccgcctcctcctctgtgaagatgggagatttagcaagatgatgggaaaggctttgaggagtgggaaagggtcagaaagtaggacatttgagcaaagggcagggtaggatgatgtggaggaagaagaatagtggaagcatgctggctgggggtcagaaattcaggttttaatcaatcctgacattgcctaaacttggctatgcacgttgggtatgtccttggttttttcatctgtaaaatgagagatttaactagatgatctccacagtcccttccagctctgacagctgatttctgtgaaatgtgtaaaaaggaagggtgatgcttcccatttttcttcagctctattgagcatagaaaacaaggtctaaatcaaaagtacattgtgcactttttagtttactttgtagcagctctaaatgaagaggcttgctcttccattgtgtggcagagatttttcagaatggacaagatgactgcacattcaagcctggagccaggggcggggctggctggcaacccacctctgggttgcttctggtaggcaggggctctcggaaaactgatggcctccttgtgctgggttggttggccagccagcaaggctcctacccagacctgcagagcctgctgcaggctccctgttctcagctgtgctcggctgcttatctcctgagtgttgttccacctacttcctacaggtgctctggcagcagccagtgggccatgatttccaggggagctggggttggcaaacgctttgtgatggggaagggtggggcatgggaagggctagcctgaaagagactttagatcttcagactccagtttgggcagactccttcatttgtagaatgaagagatacatgtggttctctctgcagcttctgcagctgtgtgggttctgtgggctcaggccagatctcctccaatgtcaaagtccggtatgtgaggctgcttccttccgaagtgtggtttggcttcagtaggttatatgtttgctctgatatccttttattttgagcattgtatccaacccccaacaaatgccagaatgtctgctgtcatactctgtaggggctacagctctcccttggtgtgaacacccaagatcagcggcctttggttcttctcaggcagatgattctactgctggagagttcttttttcctgtttgtctgaatcaggtttccttacacctcctatctgctggtcttggctctgctctccagcaccgctgacttatttttgctcacaggtttagcaggcgctcactgtacctgccacgtgccagggctgaggtccctgcgcttacttcctcaatcctgattttcttctctggacttcacttctccagctcctgtggctgtgatgggactctgagacccttgccagcctggactgccctgcccaaggctgtcagtatcctaaaagtacagagaggccttagagaacagggtccagggctcagcatgtcacttggactatgagtgacatagtctgaaggatgcggggccttccctctcacagcatgagaacacccttcctacacctttatgagagcttttgggcagctactcccacacttatccagcctcatgctgggcatcttcacacgaagtctggggccttccatcctggacttacacagcccaagtgtgaatctgtggaggcctgcatgagtctctgctatgttttctctggttatacttagagatcctttccaacctagtgagactcttttggaacctgactgtgttccatgaactgggggtaataactaaggcaatgtacttgtttcaggaaccatactgtgagaacttctccccttcctaggccctgtgagcctactttctaaacccctgcatctgacctggagtggggtggccagtgttggatgctcaaggccaaggccttgccagctcaggtttggagtgatgatggctgagtagtgggagtagctgcctgaaaactctcataaatgtgtaggaagggtgttctcatgctgcaagaggaatgccccttgtccttcagactatgtcactcatagttcaggtgacatgacagctacggttggattggagaggcaaccaccccttgcaccctagccatggcagcccctgtgctctgcagaggaaacccttgtgcagatttgtcctttcctggtcagccatgttatgctggcctgtctttggggtgcattggcctttggctctgtagggtaggtatctctaggagcagcaagtgctctgcagatgaaaatttcaaacacacataaaaggagaaaggtaaaaaaaaaaaagaagaaaagaagaagaaaggatggtaggctgaagtctctcctgcaaacctaccacgtagcttcaacaatgattagcattttgccaacttgttttatctatattcctccactttttttttttggactagaggattttctttttttttttttttttttgagacggagtctcactctgtcacccaggctggagtgcagtggcgggatctcggctcactgcaagctctgcctccagggttcatgccattctcctgcctcagcctcccgagtagctgggactacaggcacccacccaccacgcccagctaattttttttttttttttttttttgagacagagtctcgctctgtcgtcgcccaggctggagtgcagtggtgcgatctcagctcactacaagctctgccccctgggttcgcgccattctcctgcctcagcctccggagtagctgggactacagccgcccgccactactcccagctaattttttgtatgtttaatagagacggggtttcaccgtgttagccaggatgggcccgatctcctgacctcgtgatccacccgcctcggcctcccaaagtgctgggattacaggcgtgagctaccgcgcccggccaggattttcattcaaaatagaaatatatcatttcactcatgaatagtttaggatgtacctctagtagttagagggtgctttactatttaattcaatggcatttatcacaaccaacaaagttaactttaatttcttactataacccaatacccagtccatatttaatttttctttattgttccaaaaatgacattttattttatttaatgtatttttttttgagacggagtctcgccctattgcctaggctagagtgcagcggcgccatcttgactcactgtaacctccacctcacgggttcaagcaattctccctgcctcagcctctcgagtagctgggactacaggtgcacaccaccattcctgactaatttttgtatttttttactagagacggggttttgccatgttggccaggctggtcttgaacgccttacctcaggtgatctgcctacctcggcctcccaaagtgttgggattacaggcatgagccactgtgcctggccccaaaaatgacattttagtttgttcaaacagtatccaaacaacgtctacatattgcatttggttgatatgttctgtaagtttctaacagtctccttgctccttttgttttcaaatccatttatttggtgaagacatcaggacatttatcctagactatctctcattttggttttgcctaagcacatcctcttgaagttattttcttgcttcctagtgtccttttatttcctataaactggtagttagatctagatcagaatagattcaatctttttggaaagaacacttcattggtattgtgtacttcctattgtatcccagaaggaggcagtatgtctgtctccttgacctactttagtgatgaaaagatggatcaggcctgggtgcagtggctcccccctgtaatctcagcactttgggaagctgggatgggcagattgcttgagcccaggagtttgagactagcctggacaacgtagtgagaccccatctctacaaaaatacaaaaaaattagccaggcataatggcacatgtctgtggtcccagctactcgggaggctgaggtgggaagatcacttgaaactgggaggtcaagactgcagtgagctgaaatcgtgccactgcactccagcctgggtgacagagtaagactgtgtttcaggaaaaaaaaaaaaaaaaaaaaaaggattaggggattcaggtagtatcagtgattaatccattataaagtccttatcagttttttttttgcctgatgaatttagcattcactaatgatccttagctagatccattatttcataacaggttgcaaaattagctgaaattcttctataaaaattatctgtcaaccttttttttaatgcaccaaacatttattaaacattgcagtcaatagcaggaacacaagaaggaaaaagacacagtcctaccctgaagatgccctccaaactgggttgaatctccatgcttgatgctcctttcaatggattgtttttaaataataatgtagatatttttattaatgataatactcatgaatgtagtttaagacttccttctggttccctttgcccttaggttatcccttttcagggatatatagttctctgttttagagttattagaaatgattctactctgtggttatctgattaagaggatataaaattaagctcttttttcccagtttgcctttaatttgtaaggattactttttgatcagttttctgttgttaccgtcattctgcacaataaaccagcccaaactcagtagcttcaaatagcaattttttattctcactcatgcatctgcatgctggctagaattcactgatctagaccaggctccaggctgcagttgggtccaggtcagatcagtgtgtctctcatcttccctggacagcagtctagctggggcatgttcttcttacggagatgagagacacacaagagggtgtgcctaacctcacagcacatttcaagcctctgacctgatgacacatctgctaacattcctgtagtcaagcaattcatggttaagcccaagtcaaggagttgtattgcagttactatggctgtgtaacatgttaacccaaaacttagtagtggaaaacagccactattctggtcacagattctgcaggtcaggaatttgggcagagcacagtagaatggagtgtgtttctacttcacaatgtctggagtttcagctggaagacttgaaggccagagattagaatcttctgaaggctcatcaattatatgtttgagagtcgatgctggctgttagctgggagccccagggcttctccatatgatttctccatgtgggctcatttgggctgcctcatagcatggttgctgagttccaagggtggggagagggcaaggtaggggttgggagacaggtggaagaccgtactgacttttatgatttagtcttaagagacatgcagtgtcacttctgccacattctgtttactaacacagtcacaagatcctgcctaggtttaaaaggaggggacgtggactctgtcagtacatgtgggactggaaatcttgctgagaccatttttggaaaatacagtctgccacagctggaaaaaatatattctgcctctagttggaggaactgcaaagacacatggcagagaacagaaatcgatggaaagtaaagaattgaaaacaacaatggcatataccgtacttttttaaaatttaatttttaaaaattatataaagctttcctatgattccaaataaaacaagatatattgagagaagtctaattccatcttgttccctctactttattctctttgcctttctgataagaaacagtttttatcagatttttcccactgtttctttttgcaaatttaagggaaaaatatatttgtttacctttcttttttatgtaaaaggtagcagactctaagtactcttctgtactttgcttttttccatgtaatcaatcttgaagatcaccctgtagcagaatatagaaatcctcctgattcctttttgcatctgcactgtgcctcaccatgtggatatgccatggtttatctatggacattgggctgtgtccagtcttttgctcttacaaaaagaagcacagtgaggaatctggaaaatgtggcattttgtaattttaccagtgtgtctgtgcgatagtttcctagaagtaggattgctgaagcaaaatggtaaatgtataagttgtttttctctgtgttgctaagactgagagccaaaggcagaagcaatagtattcaggcatgagaggatgatcatggtggggtgcggggttttgcaggacagggaggtgggaaggggctgagtagtaagagtgatgaaaagtgctcaacttctgaatatattctggaaattgagccagaaggattgctgaatggttggctgtgaagagttgaagagaggagtcaggaggagctctgagttttggcctgggcatctggtgtacacagggaggaggaggaatgggcctagaccaggagtttgttcttggacaagttgttttttagaggcacccaagtgagatgttaggtaggcagctgggtattcaagtctgggttggaaaaataaagtagcacttcacctgcaagtgctttaatattaatgccacctggttcctacaagtaccctgaaaaagagataagggagaggaggaaattgaggcaatactagggttccaagagagtgaatcaagtgcattcaattaaacaaatatttaccttatcaaatgaaacattggaaatgaaagcactcagcatgaggcctgccattaagtgcctactagttgatgtcaggttccatgcccagggctgaggatagaaagatgaacaggtagattatgcccttatttattaccctagatcatgtttgagttaaacttgattgagggtatagttcctgacctctgggagctctgactcagtgggggacgcttggagggctcaggggcctactgtcgtccatcctcatcttcacagacagctgctaaaacagattatagaatttaaggctcagactgggcagttcacttgaaaggcctggctcattctattggctctagaatctgcagctagtcagagatgaagctcaggccaccagagccacagagaaaagtctctcactataggaaaagtgtcactttgactctttagccctcactcctgttcagtaaacttcatgaagccaggtggagggtgttggccttcagctggagtgacagtcgtgtgggacaggcgccccttgacagattttgagtattgggaagagggcaggagggagggagttccaggtctggggctgctgctctggggttgtgatttgctgttgggcagctgagcagagatatcataatttgactttgggatgtatatttctctggacttagggatcaggatgcaggctgtagcacacgaagctggctcggaagccaacagactggaataggactttcccaatggccaagcactcatctctgctcccctcctgtgctgaaagcactttttgcaaatgatggtacttagcactgattgcctggcagcctaagatacaccacccatagagcagagtcagaagggggtttcctgccagggcacttttggggagctatgatgcaggctaagccagtggaagaaagggaggaagggagcagacagaacagggaggcttgatctggtgctcccaacagacccggtttgccactttgcctgcctccactccgccccttcctccccagctttattagggtgagtgttggagcccacccaagggtccatgctgtcattggtactttgcacctacatggccattctgttgtttactttggtttgagccgtggaaacagagactgaagagcagcaggcaccagcctctgtgctgtccctactcaggcccccagttgggggtgaggagccctgggaagaccatccaaagttccaggggcagacgccagagctacacaatcacctccttttctagatagtaagaaacaaagaaaaacctctacacccctgagtgttgagtgaggaaagcaaacatgttctccctgtattcaaattagccagagagcctggtggggactcttgggggcaacaccttcccttccaatgccaaggcaatacctccccttccaggctcactcctctgagcctgcctggtagtgcaaataacttgttttcagaggcaagaagaaagaggaaactagaagttttgcctttttggaaagcatcctgtgctacctgcagtcccacatgaacactgactctggggctcccaggcctgtgaaatggagtggaagtgaccccaggagtaccagagctgagccttccagcaaagtttggcagggaatgtgggcctcagtcacactccttcagcttccttttccttagtccctactagtggctcaggaaaaaacaagaagttcagatagcgacaggcattgcttttgaaaagatagtaacagtacttagtagtaactgaggaattttaaaaatacactgtgctttttttttaattctgtgtagctctggccaatagagagttaagagcactggtgggatggaaatactaattccagagaggtagtgggcatttccaagcatcccacagcaagtcaggggcaggacagggaagaggagcctgggtttcctagctccagcctctgcttggtgaatctccctggctactttggaataagaaagctttcatgtgtccagtgaagggtcagggcatccagtgggtaagaatggcatacttcctgcccctgttgcagggcacaggcctctgggtagagtagactggggttggggagacgggggtgggcagcttcaagtagctttggggtataaggctccagggccagaagagcccaggactcataggatggagtttggtggcaaagcctctgccacagtgagactacttggaacagcccactttggtagtgcactcactctgagccaggccccagaggcctcagggtatagtagggaatgaggacagagattgttcatccctttcttcctccaactgccatggacatgggggataactctgtaaacaagccgacatgttctagatgcatatggagcacacagccatcaggagtaagacccacaccatgtaagtgattctggtaacgtgtactgattattattcgatggcatgcagtgggggtgggtttaggcataagggatagaggtagcaacaccaactccccataccccaataaattagcttttccagagaccctgctttatcctcagagaaggctttgctccccagagcacatatcattttgagaatattgtttctttgtccattcattcaacaagcatttagcccctgctgtgtatcagagtctgcgcaggctctgagttcacagcggaaacacaacagtcagcaggttggatcccacagactgtatgagcacaacacagtctgaatatagcattgaatactgaaacagtgttgaccattggacttgtaggagctcttttcttgggaaaactttagtttataacatgatggagattgaattaatctgacataaaaactttttgggacaaaaataaatgattttgtttattgtccataagagatcttaaaaagtcttttgtttgggaatggaacctctactcaaacccaggtttgggctccctagggccttgaagtcagtgggagcagctgagtagggagtggttgatggatcaaggaacacatttaggggaaaatatcacaatccaacttggacagcctcaggtcgaaagtgggtgatattataagatcagagtggtatcctttggaactcaaggatagtttgcagccaggtcttggacaagaatgaggaatcagggaaaccatcccctgtatctactttctttcttttttttgagacggtgtcttgctctgtcgcccaggctggagtgcagtggcgcgatctcggctcacggcaagctccgcttcccgggttcacgccattctcctgcctcagcctcacgagtagctgggactacagtcacccgccaccacgcccggctaattttttgtatttttagtagagacagggtttcaccatgttagccaggatggtcttgatctcctgaccttgtgatccgcccgcctaagcctcccaaggtgctgggattacaggcatgagccaccgcgcccagccaccttgcattttcatgggctcctcagatccctcagctgtgtgtgcagaagaaaggaggaaggccggtgaataggcagcctctgccaagtacctcttttggggatgactctcaggtactccgagactgggggaggccaagtctcagagtacctgagggacccaggctcatggagacttctccactccgtctttcctaggtgcaatgccagggtcttggatgtagcggtgagcaaagctggtgcagccctattctcaaggagataagggcctaatgggagagactaactttaatcacatacaaatcaaaattctattgaaggagtaggaccagaagccatgagaactaatgccctgaggcagtgatgccaggtgaagacatgtgtgatgtgtgtctgaggggtgaataggagtcaaggaaataggtaggtggggaggaaaggggggtcaagccttctaggcaggtggaaccacacatgcaaaggccctgaggctcatgatcaaagaaataggacatgccttttcagtggaagatggaccagaaagatggaggggagcaaagggacatgttctggcaatggtacacacagcctacttctagccaggacatcctcctgctatgattgctgggactggttgttctgtctttcctgtcccctctaactcctccccagctttttcctctgggctccaacaggagctcactgcccctccctgctttggggttgtttgtccagctagttgctcctgccactatgagagggcaccaaaatagttgttgcccccatgaggagaggtagagaggtagcagcagtactttctctctggtttttttttttttttttgagacggagttttgctcttgttgcccaggctggagtgcaatggcgcaatcttggctcaccacaacctctgcctcctaagttcaagcgattcttctgcctcagcctcctgagtagctgggattacaggcatgtgccaccatacccggataattttgtatttttagtagaaacggggtttctccatgttggtcaggctggtctcgaactcccgacctcaggtgatccgcccgcctcggcctcccaaagtgctgggattacaggcatgagccactgcgcccagcctttctgtttttgagatggggtcttgctccgttgcccaggctggagtgcagtggtgcagtcacagcccattgcagcctcagcctcccgggctcaagcaatcctctcacctcatcctcccaagtagctgggactagaggtgtgcgtcgccacatctggctaatttttgtatttttgtattttttttttttttttttgtagagatggggtttcgccatgttgcccagactggtcttgaactcctgggctaaagcgatctgcctgcctcagcctcccaaagtgttgggattataggcgtgagccactgtgaccagctaatagtacttttaaaaacatgtttttggatgcatagtgaaattattatctctttcccaggagtcatcaggactagaggtacagtcaggtttgactgctgaccagggatcatactctggcaggttccccacaggaagtgcattgcaggggtgggggcaggaaagcctgcacatggtagcttttttcaggtgaccatgacacccctgaccacagttggagtgcaatggcgtggtctcggctcactgcaacctctgcctcctgggttcaagcgagtctcctgcctcagcctgcctagtaactgggattacaggcgcctgccaccatgcctggctaatttatgtgtttttagtagaggtggggtttctttttttttttttttttttttttgagacagagtctcactctgtcaccgaggctgtagtgcagtggcacaatctcggctcactgcaacctccacctcctgggttcaagtgattctcttgccccagcgagtagctgggactacaggcgtgtgccaccatgctcagctaatttttatttttttctttttaagtagagatggggtttcaccatgttggccaggctggtcttgaactccggacctcaagtgatccgcctgccttggcctcccaaaatgctgggattacaggcatgagccaccgcacccagctggtgtcccttttttatattactcttctgagttctggtatgtcagtacttttgagttttgactatgttgatgagactcttctggaattttttcttttggcttaaaattttaaaaaattatacaagtaaggccgggcgtgatggctcacgcctgtaatcctagcactttgggatgccaaggcgggcagatcacttgaggtcaggcttgagttgccgaagatcagcctgggcaaaatggcaaaatcccatctctactaaaaatacaaaaattagccgggcgtggtggtgggcacctgtgatcccagctactagggaggctgaggcaggagaatcacttgaacccgggaggcagaggttgcagtaacccgagatcgcagcactgcactctaacctgggcaagagagtgagactctgtctcaaatatatatatgtgtgtgtatatatatgtaaatatatatgtgtgtatatatatgtaaatatatatatgtgtatatatatgtaaatatatatgtgtgtatatatgtaaatatatatatgtgtatatatgtaaatatatatgtgtgtgtatatatatgtaaatatatgtgtgtatatatgtaaatatatgtgtgtatagatgtaaatatatatgcgtatatatatatttgagacagagtcaaatatatatacatatatatgtgtatatatatagtatatatatgtatatatatgtgtgtgtgtgtgtatatatatatatatatatacaagtaagacacagacacattcttggagtaatattcaaacaattcagtcatatattgaagtacaacgtccactgcccctttttttctagtgcagtccatctccaccttgggtcaacttccactgccccttccttttccagcattattacttttctgggcatatttctaggatctttttagaagattataggatctttttagaagatcctagaaatatgcatttatatctgtgaacctattgtgaatatacacacgcatacttttttgaagaaagatcatactaaatgcattgctttgcaccttgcttttttcactgaacaatacgggagatacttctccccaccctcccacttttcagagaattagctgttttggtcccagataacttttgtaagagacaaggtgttgtctcttactgaattagagtaaccgctggtgccttttggggctgttgggtactcctgtgtcccaggtgaatctccaagtaaaccactatatcttctgttctagctggattcctacttgctccatctctgagggcactgtgagctgcagcagcatcctgcttggggaggacagtggccttgtcacctaggttctgcctttggattccagggagcttccaggctcttgtctccctttctggccagggctgtctcttgaatgcaggaatatctgggaaattccctgtttcttccttggtaagaggtgtgaattcacttttctttttttttcttttttcttttttctttttttttttgagacagagtcttgctctgtcactcaggctggaatgcagtggcacgatctcagctcactgcaacctccatctcctgggttaaagtgattcttctgcctcagcctcccaagtagctaggattacaggcacccaccatgatgctcggctaattttttgaaattttagtagagatggggtttcaccatgttggccaggctggtcttgaactcctggcctcaggtgattcacccacctcagcctcccaaagtgctgggattacaggcgtgagccactgagcatggcctcactttctttattcataccctcatatctgggcagtctgccttgctcaggctcatactcatctgagcagaagactgctttcagaggttccctgggagcagggccattgcagcatgagtagtcatttgcagccagcatcctgcctttcttcttgatgccagatggtgccctacattggtatatgctgcctgtgtcccttcagagactcaaccccaatccggaaggagggtggttcccatctctctggaactcttctccaaaggttttggtgtttggaatttgaaatttttttctagtgcagtccatctccaccttgggtcagacctcctttccagggcacgatagtgcttggagtcattcatttattcaacaaatatgtattgagcacctgttacatgccaaacactgttctaggcagtacttaatgttggctactaattatgtcctgctcccgaatttcttcgctatcttgcttgtttccctatggcttgtgagaggcttctgcctctaaatttaccccaggaatatgaattttgaatttctaggcaatcaaattacaagagtttgttcctgggttttaactcaaattctaccctactgggaacattttttatcttctatgaaatggcaaacagctaggagacatgtttcctaggaactggccttcttggtgcatttcagaggaagcacttcatttcagagggttgagattgtgagagcagggcttggaggccaggagttcccaggccaggtcctagccttgctgcctgtttttctgttgaccttcagctgctttgtttcttttttcttttcttttctttctttttttttttttgtgagacagagtctcgcactgtcgcccaggctggagctcagtggcatgatcatggcttactgcaacctccacctcccaggttaaagcgattctcctgcctcggcctcccaagtagctgggattacaggcatgcaccaccatgcctggctaatttttgtatttttagtagagatggggttttaccatgttgcccaggctggtctcaaactcctcacctcaagtaatccacccgcctcggcctcccaaagtggtggaattacaggcatgagccaacgcgtcagcttgctttgtttctttaatctttagttttcttggaaaaaatggaaatgataagaatacccacctgtgtggttgttaggcaggtattatgtaaaggaagagcctgctacatagagtgagctgagaactgctgggggtagcggggttactgtcctgattcccagcagtgaaaggcatttaaatcattacaggtttcacacctaagttttcttttttcattttaaacatcacttgttattttctaattttgtggatgcttaatacattagcacactaatacatgcttacaatttagaaacgaatattgcatatttgggggctgtaggctcggctatccttttcttaaagacaggaccttccttgttgcccacctaggatggtctcaaactcctgccctcaatgctgccacagcctcccaagtaactgggattataggcacaagccactgtgcctggctagttactcttttaaaaatatctttctgagatataattcacttaccatagaattcactcattttaactgtgccatccaatggtttttagtgcacttagagttctacaaccaaagctacagtttttttttttttataagacggagtctcgctctgtcgctcagcctggagtgcagtggtgcgatctcagctcactgcaagttccgcctcctgggttcacgccattctcctgcctcagcctcccgagtagctgggactacaggtgcccaccaccttgcccggccaattttttgtatttttagtagagatggggtttcaccgtgttagccatgtggtctcaatctcctgatctcgtgatccacccgtgtcggcctcctaaagtgctgggattacaggtgtgaaccaccgcacctggcccaaagctacaatttgagaacattttcatcacccacaagaagaaaccccatacccaaaatgtcactttccattcttcccccctctatctatcctccaggcctaaggtaaccactaatctactatccacctctctagatttgcctattctggacatttcatataaatggaatcatgcaatgtgtgttttgggggtttggcttctttcacttagtgtgttttccaaggctcatccaggatgtaagatgtagtgtgtatcagcacttcattcctttattcatttatttgtttagagagggaatcttactctgtcacccagaggacatggaggctggagtacagtggtatgatcatggcttactgtaacctcaaactcctgggctcaagagatcctcccacctcagcctcccaagcagctaggactacaggcatgcaccaccatgcctggctaattttttttttttttttaagtgacagaatcttcctatgttgcccaggctggtctcaaattcatggcttcaagtgatcctcctgtctcaggcacccaaagtgctgggattacaggcatgagccactgcactcagccagttacttctttccttcttattgcccagtgatatttcattgtatggatgtaccacattttatccatttatcaataagtatgattttaggtatgggtttttcatagatgcgctttacaattttttttttttttgagacggagtctcgcactgttgcccaggctggagtgcagtggcaggatctctgctcactgcagcctccgactccagggttcaagcaattctcctgcctcagcctcctaagtagctaagattacaggcgcccgtcaccacgcccggctgattttttctttctttcttttttttttgtatttttagtagagacagggtttcaccatgttggtcaggctggtctcgaactcctgacctcatgatccaccagcctcggcctcccaaggtgctgggattacaggtgtgagccaccgcacctggctagatgcgctttaaaaaattgaaattcctttctatttctagtctgttaaatttttttaagcataaaaaggtattgaatatcaagatgatcatgtagtttttgtaatcttgatagatggtttttgtccatcattctattaatatgctatattaattgattttttagatgttaagccataattgcatgtctgagaaaaattcatttggttattatattaaatcctttctatatgtcaccggatttgttttgctagtagttgtttataatttttgcatctatagtaacaagatatattggtctaaagttttcttgtgatgtttatgtctgtttttttacaaatttaatttgattattttattttgtttatttcattttatttagatacagggtctcattatgttcctgaggctagattcaaactcctgggctcaagtgatcctcccaccttattcccctgagtagctgggactacaggcatgtgccaccacatccaatttatgtgtggttttgatatcagggtaattgtggcctcatggaatgagttgagaagtgttttatcctgttctattttttggaagagtttgtgaaagattaatatgaaatcttaagacagttttattgagatataattaatatgccagaaaatttacccatttaaagagtataattcagtggtttattacgtattacattataaatttttttaggatcttgctctgtcaccgaggctggagtgcagtggtgcgatcatgacgcactgcagcctcagcctcctgggctcaagcagtcctctcatctcagcctcccgggctcaagcagtcctctcatctcagcctcccaaagggactacagtcatgcaccaccatgtctggctaattttttaatattttgtagatatcaggttttactatatagtctagactggtctcgagctactgtactcaagcaatcctcctgcctctgcctcccaaagtgctgggatttacaggcatgagccactgtgcctggtcacattattaatcttttaaaaatggtgataaaatataaatatcataaatttgccattttaaccattttaagtgtacaatttagtggcattaattactgtatattcatgattcatgttgtgcaaccatcaccactatctatttctaaaatttttaatcaccccaaactctgaccattaaccagcacctccccattgacccctttcttcagcgcctgttaacttttttttttttttctttttgagacagggttttgctctcatcactcaggctggagtgcagtggtgtaatcttggctcactgcaacctctgcctcccgggctcaagtgattctcatgcttcagcctcccaggtagctgggcctacagaagtgtgccaccatgccaggctaatttttgtatttttagtagtaaagactgggtttcgccatgttggccaggctggtcttgaactcctgacctcaagtgatctgcccacctcagcctcctaaagtgctggaattacaggcatgagccactgcgcctggcctatccatttattgatgggcacttgggttgtttctactttttgactccagtagtccccccttatctgcggtcttgctttctgtggttttagttacccacggtatggtacaatcatattttgagagaacacattcatatagcttttattacagtatattgttataactgttctattttattattagttattgtgaatctcttattgtgcctaatttatatattaaacttcatcataggtttgtatatgtaggaaaaaacaaggctgggcatggtggcttacgcctgtaatcccagcacttggggaagccgaggtgggcggatcacaaagtcaggagatcgagaccatcctggccaacatggtgaaaccctgtctctactaaaaatacaaaaattagctgggcatggtggcacgcgcctgtagtcccagctacttgggaggctgaggcaggagaattgcttgaacccaggaggcagaggttgcagtgagccgaaatcgcgccactgcactctagcctgaagagagagcaagactctgtctcaaaaaaaaacccaaaaaacaaaacaaaaaaaaacaaactttgtgtatataggcatctactgggggtcttggaacatatcccctgaggataagtgggggctactatattgtgaataatggtgtaataaacattggcattcaagtatctgttcaagtccctggttttacttcctctggatataaacctaagagtggaattcctggatcatatggtaattttatgttaggcttttcgaggcgctgccaaaaatttttctgtagcagctgtaccgttttacatttccaccatcattgtatgagggttccaatttttccacgtccttgtcaacacttgttattttctgtttattttgtttgtttttagtaatagcctaaagagtgtgaagtggtatcttattgtagttttgatttgcatttttctaatcaatggcttattggccatttgtaaatctttagagaaatgtctgttcaagtcctttgcctatttttgttttcaagacagggtcttgctgtgttgcccaggctggagttcagtggctatttacatttgcagtcataacacactacaggctcaaatttctgggctcaagcaaccctcttgcttcagcctactgaggaactggaactacaggcccagctgaaatgaactgccttttgtgtgttgattttatatccttcagttttgctgaagttgtttattagttctaacttttttgtggcctgtttagggttatctacatgtaagatcatgtggtctgcaggtagagataattttacttcttcttttccaatttggatgtcctttatttattttttttcttgcccaatagctctgactaggacttccagtactatgttagatagaaatggtaaaacttccttgcacatcgttgtcttgtttctgattgtaaagggaaagcttctaatttttcactattgagtattatgttagctgtgaacttttcataaatagtccttatcatattgagaaagttcccttctatttctagcttaagtcttttgaatcatgaaagtgtattgacttttgtcaaatgctttttctgcatcaattgaggtaaacatatagtttcttcccttcattcccttcattctattaatatggtgtattacatttatttatttatttatttatttatttatttatttatttatgagacagggtcttgctctgttcccaaggctggagtgcagtggtgcaatcttggcccactgcagcctctgcctcccaggttcaagagattctcctgcttcagcctccagagtagctgggattacaggtgcgtgcaactactcctggctaatttttgtatttttagtagagatggggtttcactatattggccaggctggtctcaaactcctggcctcaagtgatttgcccacctcggcctcccaaagtgctgggattacaggtgtgagccactgtgtctggaacattgattgatttttggatgttcaatcaaccttgcattccagaaataaagcccaatagaaggatgtacaatacttctaatatgctgctgaattcagtgtgctagtattttcttaaggatgtttgcatctcttttcataaggaaaattgatctgtagttttcttgtagtatctttgttgatattaatttatttttggctgggcacagtggctcatgcctctaatcccagcactgtgggaggctgaggtgggaggatcacttgaactcaggagttcgaggctgcagtgagctatgattgtgtcactgcattccagcctggatgacagagcaagaccctgtctgttataaaataaaatttttaaaaaataaattctttttcaatggttagtaggattcaccagtgaagacaactgagcataagcttttctttgtgggaagttttaaaattacttattcagtttatttatgtgttataggtctattccgatttttcatttcttcctgagtcagttttgatagtttgcatcttggaatttgtcaatttcatctaaattacctaaggatgtgtggttgttcatagtattctcttgcaatccgatttatttatttatttatttatttatcaagatggagtctcgcactgtcgcccaggctggagtgcagtggcgcgatctcggctcactgcaagctctgcctcccgagttcactccattctcctgcctcagccttctgagtagctgggactacaggtgcccaccaccatgcccagctaatttttatttttattttttttatttttagtagagacggggtttcaccgtgttagccaggagggtctcgatctcctgacctcgtgatccacccacctcggcttcccaaagtgctgggattacagacgtgagccaccacgcccggccaatccttttaatttatttaagattggtagtaacatcctttcttttatttctgattttagtcatttgaatctttttttctttgttaaaagaaggcttattgatttttttttttatcttttgaaagaaccatcttttggttttattgtctttctctattttctattctgtatttcacctctaatctttattattttcttcattatatttacattgtgtttagtttgctcttctttttctaagtattaagtcggaagtttaggttattggtttgaggtcttttctcttttttgttttattttctatttttcatttttttgggcacttagtaggtgtatatatttataaggtacctgagatgttttgatacaggcatgcattgtgaaataagcacaccatggagaatggggtatccatcccctcaagcatttatcctttgagttacaaacaatccaatcacattctttaagttatttaaaaatatacaattaagttattattgactatagtcaccttgttgtgctatcaaatagtaggtcttattcattctttctaactatttttttgtgtacccattaaccatcctcacctcttccaccaccctcccactacccttcccagcctctggtaactatccttctcttctccatgttcatgggttcaattgttttgattttcagatcccacgaataagtgagaacatgcgatgtttgtctttctgtgcctggcttatttcatttaacataatgatctctagttctggccgtattgttgcaaatgactgtatctcattctttttttatggctgagtagtactccactgtatatacgtgccacattttctttatccattcagctgttgttagacacctaggttgcttcgaaatcttagctattataaacagtgctgcgacaaactcaggagtgcagatatctcttcaatatattgatttcctttcttttgggtggatacccagtggtgggattgatggatcatatggtagcccaatttttagttgtttttttttttaattttaatttttattttattgaattatttttggtgtgtctaggtcaaggaaagaggagatcgtgggtggggaaacagactgagggaatcagaagcaccactgtccatccggaattaaatccacatcccagtatcttctgcacatatttcactaattatttcctctcggaactcctcccctcgtgcttcttcctctggtgaggccggcgctcccttcccaggccgcagcggacagacagggattgggtttcgtgtgcctgccacaccaggcaggctcttgcggctcccaactaggcggccttgcactccgtgtgcactggccacacatccttgcctcctccacccggtccgccgccggtttccttggaagttaaatcttggaggatttgtccacacccctcacgtttcttcagccgcccctgggcgctgcgtctaaccccaatttttagttttttgagaaacctccaaactgttcttcatagtggttgtactaatttacattcccactaacagtgtacaagggttcccttttctctacatccttgccagcatttgttattgcctgtcttttggataaaagccattttaactggggtgagatgatacctcatttagttttgatttgcatttctctgatgatcaatgatgttgaatacctttttatatgcctgtttgccattcgtgtgtcttcttttgagaaatgtctattcagatcttttgttcatttttgatcggattattagatttttttctatatagttgtttgagctccttatatattttggttattaatcacttgtcagatggttagtttgtacatattttattccattctgtaggttgttccttcacttttttgattgtatcctttgctgtgcagaagctttttaacttgatgtgattccatttgtccatttttgttttagttgcctgtgcttgttgggtattggtcaagaaagttttgcctggagattttcccctatggtttcctatagtagtttcacagtttgaggacttatatttaagtccttaatccattttgattttatttttgtatatgatgagagataggggtctagtttcattcttcagcatatggatatccagttttcccagctctatctatctatctatctatctatctatctatctatcattatctatttacttatttatttattctgagacagggtctcactctgttgcccaggctggagtgcaatggcacaatcatggctcactgcagcctcaacctcagcctcctgggtagctgggactacaggcacacaccagccaattttgtgtattttcagtagagacagggtttcaccatgttgcccaggctggtcttgaactcctggactcaagcaatccgtccatctcagcttcccagagtgctgggattactggtgtgagacaccacaccctacccccagcaccatttattgaagagactgtcttttctccagtgtgtgttcttggcacctttgtcaaaaatgagttcactgtaggtgtgtggacttgtttctgggttttctattctgttccattggtgtatgtgcctttttaaaatgccagtacaatgttgttttggttactatagctctgtagtctaatttgaagccaggtaatatgattcttccagctttgttctttttgcttaggatagctttggctgttctgggtcttttgtggtttcatataaattttaggatttttttttattctgtgaagaatgtcattgatagtttgatagggattgcttttaatttgtagattgctttgggtagtatggacatttaaacaatattgattcttccaatccatgaatatggaatatttttccattttttggtgtcctcttcaatttaattcttcagtgtttcatagttttccttatagagatcttttacttctttggttaagttaattcctaggtatttaattttatgtgtggttattgtaaatgtgattactttttatatttcttttgcacattgttcactgttggcatatagtaatagaaatactactgatttttgtatgttgattttgtatcttgcaactttactgaatttatcaattctaatagttttcttgtggcatcttccagtttttacaaatataagaccatatcatcagtaaacagggataatttgacttcttcctttcccctttggatcccctttatatctttctcttgtctgattggacttaagtactgttgttactggtggagggtcttgactacaagtggtccaggttcttggcattttgaacaaagaattggagaaaacgcacaaaacaaacgaaagaatgaagcaatgaaagcatagatttattgaaatgaaagtgcactccacagactgcgagcaggctagagcaagcagctcaagagtgctgcttacacaattttctggggtttaaatagtctttagatgtttcctattggttgcttgatttgctccctgtgtagatgaagtggtagcctgtgaccagtatgattggttgtggaaggcgatcagtcagaggctgaagtgaagttacaaagttacaccctatgcaaatgtctgattggttgcgggagaggaccaatcaggggtactttctgtttctcatctgccatgcaaaaggagtaacttctgtcattttgttacttgggcagggaaagttggggtttttcttttcttttcttttcttttcttttcttttcttttctttttttttttgagacaagagtctcgctctgtcgcctgggctggagtgcagtggcgcaatctcggctaactgcaaccttcgcctcctgggctcaagcgattcttctgcctcagcctcccaagtagctgggattataggcgcctgctaccacgcccggctaatttttgtatttttagtagagatggggtttcaccatgttggccaggctggtctcaaactcctgaccttaggtaatctgcctgcctcagcttcccaaagtgctggaattacaggtgtgagccactgcacccggccgggattttccttttgattcagttctaggaagtcagtgcaaattgaccttaggttcccttcctccagaccctattctcctgcctcactatgttgaatagcagtgatgacagtgggcatccttgtcatgttccagatcttagaggaaaggctttcgatttttccccgttcagtatgacactagctgtaggtctgtcgtatatggctttcattattttgaggtatgttccttctatccccagttttttgagggttttttttaaaatcatgaagggatgttgaattttttcaaatgctttttcagcatcaattgaaatgaatctttcttttcttgaatataggtatttgcagctagaaatttctctgagtactgctatcactacatccaatgttttgatatgcagtgttttcattttaattcctctcaaagtactttaaaatttcttttgtgatttcttctctgacccatgagttatttaggaatgtgttgttcaatttacacttatttgtgaattctgcaaatttatttctgttattgatttctaatttaattatattgtgttcagaaaacattcattgtatgatttcaagtcttttcaattttttgaggtttgttttgtggcctagtttatggcctaatctggagggtgttccatgtacatttgagaagagtgcgcattctgctgttgttgggtggagtgtttttttttttttgagacagagtctcgctctgtcgcccaggctggagtgcagtggcgcgatctccacgcactgcaagctccgcctcccgcgtttacgccattctcctgcctcagcctcccgagtagctgggactacaggcgcctgccaccacgcctggctaaattttttttttttttttttttgtattttttagtagagacggggtttcaggatggtctcgatctcctgaccttgtgatccgcccgcctcggcctcccaaagtgctgggattacaggcgtgagccaccgcgcccggccgggtggagtgttttttaaatacccgttagttctaattagtttatagtgttgctcaagttttttattttcttgttgatcttctgcctagttgttctatccattattataaagtattgaagtatccaattactgttgttgaattgtctatttctcccttcaattccgtcagttttgcatcatgaattttggggctctgttcttaggtctatgtatgtgtatatgtttacaaatgttatatctttctaatggattgacctctttatcaatcttcaatcttcattttctttttctttctttctttcttttttttttttgagatggagtctcactctgtcgcccaggctggagtgcagttgcgcaatctcagctcacagcaacctccgccttccaggttcaagcgattctcctgcctcagcctcccaagtagctgtgactacaggcgcatgccaccacgcccggctcattttttgtattttagtagagacggtgtttcaccatgttacccagggtggtctcaatctcctgagctcaggcgatccaacagcctttggcctcctgaagtgctgggattacaggcatgagccaccatgcctggccaatcttcattttatttttccttctttctttttctttgttttttttttttgagatggagtctcactctgtcgccaggctggagtgcagtggcgcaatctcagctcactgcaacctccgcctcccaggttcaagtgattctcctgcctcagcctcctgaggagatgggactacagtcgtgtgccaccacgcccagctaatttttgtatttttagtagagacggggtttcaccatgttggccaggatggtcttgatctcttaacctcgtgatctgcccgcctcggcctcctaaagtgctgggattacaggtgtgaaccaccacgccccgccaaatcttcattttcaataacatttgttttgtgttgtaaagtctgtttggtctggtattagtatagccattacagctgtctgtggttgctgtttgcatgataatctttgcccattaaaaaaaatttcaacctatttgtttctttgaatctaaaatatgtcctttagatagccttttgttggattctttaaaaaaaacaaatctgataatctctgcctttagattatttaatccattttcatttaattaacattattaatatggttggatttatatctggcattttggttttttactatttgtctcatgcttttttatttatctcttccactgtaatttactacttttttttattaagtgggcattttctagtgtaacattttaattatatattttaaaattatgtgcctagtggttgctttagggcttacaatacacatcttaatttatcacaatctacttcaaattaatgctaacttaattccagtgaaatatagaaactttactcctatacagctacgttacttcccccatttttgtgctattgttatatatattatatctacatatgttataaacccaataaagcataataattattacacataattatatagttataattgtgactttatgtaatattatataatgttatataaccttatatgatctttttaagagggtgagagaggccaggttcagtggctcatgcctgtaatcccaacactttgggaggccgaggtgggtgggtcacttgagaccaggagtttgagaccagcctggctaactaacatggtgaaaccccgtctctaccaaaaatagtaaaaattagccctgggaggcaggagaatcccttgaaccccggaggcagaggttgcagtgagctgagatcacaccattgtactccagtctgggcagcagagtgagactccatctcaaaaaaaaaaaagaaaaaaagaagctgagaggaataaaaggagagcaagtgtatatttgtagagtttgttgtatatcggccctcttatttaccattcctgtgggttcaagttactatctgatcatttccttacttcaatacagctttgttcccacttacctcctttgtgctctttttgtcaaacatattacacttctatatgttacatagaaacaatacagacacatacacacattgttttatggaattgctttttaattcagttaagagagtaaaagagatgaaatatgcaattatgctttcttttgtacttacctacctaattacctttaccagcactctttgtctttttgtgtggattcaaattatggtattgtgtggtgtcacttgctttctgcctaaataactttgttatttcttgtaaggcaatctgccaccaacaattttttttcctgcttttgtttatctggtaatatctttattttgcctttatttaaaactaatctatttcttccagatttttgtttttgtttttgtttttttttgaggcagggtctcactctgtcacccaggctgtagtgcagtggcatgatctcagcctcgacctcccaggctaaagccatcctccctacctcagcctcttgagtagctgggactacagatgtgtgccactatgcccaactaatttttgtattttatgtagagatggggttttggcatgttgcccaggctggtctggaactcctgagctaaagccatccacccaccttggcctcccaaagggtacgattacaggcatgaaccaccgcccccagcctcttccagagattttcaaactgcctttatatttgttatttaaaagatcactggctctgataaagttgagagccaaagacagagtaatattataaaatgatgaaatatcaacacatctctcattcacaatttttaaaaactgacaaaccaatgggataggataatttgagagagacagttgatttttttaaaattgtgattattatttctcaattatttatttatttatttatttttttttttgagatggagtctcactctgtcccatgctggagtgcagtggcatgatctccactcactgcaacctctgcctcccgggttcaagcgattctcctgcctcagcctcccgagtacctgggattacaggcacgcaccaccatgcttggctgatttttatatttttagtagacacggggtttcgccatgttaaccaggctagtctggcactcctgacctcaggtgatccacccgcctcagcctccaaagtgctgggattacaggcgtgagccaccgtgcccgaccaattatttctcaattttttaaaaattgaatttcacatgcagctgtaagaaataatacagagagggccggacgcggtggctcacgcctgtaatccccagcactttgggaggctgaggcgggcggatcacgaggtcaggagatggagactatcctggctaacacggtgaaaccccgtctctactaaaaacaaaaaattagccgggcgtggtggcgggcgcctgtagtcccagctactcgggaggctgaggcaggagaatggtgtgaacctgggaggcggagcttgcagtgagccgagatagcgccgctgcactctggcccgggtgacagagcgagactccatctcaaaaaaaaaaaaaagaaataatacagagagattccttttacattttgcccaatttttcgcagtggtaatgtttagcaaaatggtgcagtatgatattataaccaatattcataaaatccaccaatctttctcagatttttctagttttacttgtactcatttgtgtgtgcttaagttgtatacaattttatcacttgtgtaggtttgtgtatctatgaccacagtcaagatactgagcagttccaagcacagggatcctttgtgttgtctttttacaactgtattcacctcgttttgcccaacccttccaccccatccctaatccctggcaaccacaaatctatcctccattaaagcaaaatatgttatttcaaacatgtagtataagtggaataatacaatgtgtaaccttttggggttggcttttttcactcagtgtaattccctagagattcatccacttgttgtatctgtcaatagttcattccattttattgctgagtagtatttcatggtatgcatgtatcacagtttgttcaaccattcactgttgaaggtcatctgggctgactccagtgttggtctattacaaataaaccttttatgaacattgatgcacagatttttgtgcaaacacaagtcttcatttttctggtataaatgtccagaaataaaatcgctgggtcatttggtagttgcatgcttagtttttaaagaaattgccaagcttttccagattgattgtgccatttatatttccaccagcaatgtaagagtgattcagtctctctgcatctttgtaagtatttggttgttttttcattttagttatcattataggtctgtagtgaatcctgttgtggttttaatttgtatttccataatggctaatgatgttgaacatcttttcatacactttttgccatgtgtgtatcctcttcagtgtgtctgttcatgttttttgctgttttctaaatttttttcttctgttgagttttgagggttctttatatattctagatactagttttttttttgttttgttttgttttttgtttttttttttttttgagatggagtctcgctctatcgcccaggctggagtgcggtggcgtgatcttggctcactgcaaactccgcctcccaggttcacgccattctcttgcctcagcctcctgagtagctgggactacaggcacccgccaccacgccttcctaattttttgtatttttagtagagacagggtttcaccgtgttagccaggatggtctcgatctcctgatctggcgattggcctcccaaagtgctgggattacaggcgtgagccaccacgcccggccgctagatactagtttttaaaaattaaatatgtagtttcaaatacattctcccagtctgtagcttttcttttcattcttttcacatgggctttaacaaagcaaaaccttttaaatttgatgagatctaatttgtcagtctttcctgtaatggcttatgcttttagtatcaagtctaagaactctttgtctagttgtagatcctgaaatttttcctaacatttaagtctattagccattgttagttaattctcatataaggtttcaagcttaggccaaaatttattttttaaaacaaatatggatatccagttgttctagcaccatttgttgaaaaggctgtctttcatcctttgagttggttttgcagctttataaagaatcaatttagtatagctgtgtggatgtatttctgaattctctattctaaatcctctattgatttatgtgtttatccttccaccagtagtatactgtttttattactgtagctacacaggaagtcttaaattgggtagaataatttctcccactttattcttttttgagaagattattttagtattccagggtccatgcctttctacataaattttagaatgagtttttctatgtctgtaaaaaaattactgagattttgataggaattgaattaaacttacagattaatttgggaagaatgaacatcttttctacattgactatgttcagtccatgaacatagtatatcttcccatttatttagtttttttaaaatttctttcatcagcattttataatttttaacgtacagatcctacaattttttttttttttttgagaccaagtcttgcttgctctgtcaccaggctggagtgcagtggcacaatctcggctcactgccgtctctgcctcccaggttcaagtgattctcctggctcagcctcccaagtagctaggaccacaggcgtgcaccatcatgcccggctaattttttgtattttagcagagatagggtttcaccatgttggccaggatggtctcgatctcctgaccttgtgatctgcctgccttgacctcccaaagtgctgggattacaggcgtgagccactgcgcctggccacaattcttttttttttttttgagatggagttttgctcttgttgcccaggctggagtgcaatggcacgatctcggctcactgcaatctccacctcctaggttcaagcaattctcctgcctcagccttccgagtagctgggattacaggcatgcaccaccacccctggctaattttgtatttttagtagagacagggtttctgcatgttgaggctggtcttgaactcctgacctcaggtgatccacccgccttggcctcccaaagtgctgggattacaggcgtgagccactgcgcccggcctcacaattttttttttttaaagagacagtgtcttgctttgttgttcaggctggagtgcagtggcataatcatagctcaccgcagccttgaactcctgggctcaaggcatcctcccactttggcctcccaaagtgctgaaattacaggcatgagccaccacacccagcccctgtaaatgttttttaagtgtattcctatttcattttatttggaattattgtaagtggtgttacatttttattttgatttcttcaccttcattgtttgtatgtagatgtgtcattggcttttatgtgtttattttgtatcctgcaaccttgctgaactgacttaataattttacatttttttggtaggttctttaggatgttctacatagacaattatgtcatctgcaaatatatagtttttccaagtggttgtgtttaaatattaaaaaaaagaaatatgtagttttatttcttcctttctaatctatatgccttttatttcttttacttattttatttgccttattgtggtgactagaacttccattattatgttgaataacaatagtgagagtatatctttgcatcgtacacagttttatggggaaagcattcagtttttcaccattaagtataatggtggcagctggatgtggtggctcatgcctgtaatctcagcattttgggaggccgaggtgggtggatcacgaggtcaggagattgggaccatcctggctaacacggtgaaaccctgtctctactaaaaatataaaaaattagccgggtgtggtggcgggtgcctgtagtcccagctactcgggaggctgaggcaggagaatggcgtgaacctaggaggcggagcttgcagtgagccgagattgcaccactgtactccagcctgggtgacagagcgagactccgtctcaaaaacaaaaaaagtataatggtggctatagtttttttgtatgtgctctttatgaagttgcaataattccctgttattcctacttgatgagacttttttaaattaaaaaagtttttgtaattttaattttttgtagagatgaagtctcactatgttgcctaggctggtcttgaacttttggcctcaagcaatcctcctgcctcggcctcccaaagtgctgggacttacaggcatgaggcaccatgcctggcttttttgaaaattctagagagggtctcactattttgcccaggatggagtgtagtcttagtcacagacgtgatcatagcacactacagctttgaactcccaacatcaagtgatcatgctgtctcagcctcctaagtagctgggactacaggcctacaccattgcacctggattgctgaaacttttttttttctttaaatcatgaatgggtgttagcttttgtcaaatactttttctgtgtcagttgataagattattatattgttttccttatatcgttgatgcggtggtttacaataatggattttcaaaagttaaaccatttgctttcatttttgaatgatagttttgctggatgttaaactcttgattgacagttgagcttcttaaatgtttagattaatgttttcatcaaatgtgggaacttttcagacatgatttcttcaaacattttttatgttcctaatttatgtcttttccttgtattcccatatgttgatatacttaatggtgtcccacatttctttgaggccctgttcatttttctttattcttttttctctctgttcttcagattgcccagtcttactgatctatatttgagttctctgtttctttctcctaccagctcaaatgtaggatttttttcatttccattaatgtacttttcttttctgtttttagagacagggtcttgctctgtcacctgggctagagtgaagtgacatgttcacatcttactacagcctcgacttcccaggctcaagcaattctccttcatcagccccctctccccacctgccagtagctgggactacaggtgtgccccaccacacccagcacatttttaaatttttttgtagagacagggtctcactatgttgcccaggctgttcttgaactcctggcctcaagtgatcctcctgcgttggcctctcaaagtgctgagattacagacatgagccactgcacttggttcattattgtactttttttttcttcttctttgagacggagtctcactgtgtcgtccaggctggagtgcagtggcgcaatctcggctcgctgcaaactccgccttctgggttcacaccattctcttgcctcagcctccccagtagctgggattacaggcatctgccaccacacccagctaattttttgtattttttattagagatggggtttcactctgttagccaggatggtctcgatctcctgacctcgtgatccacctgccttggcctcccaaagtgctgggattacaggcgtgagccaccacgcccagcctcattattgtacttttcaacaacagaatttctagtttatttttataatttctctttattgataatctgtatctgataagacattgtcatcatagtttcctttaattttttagatgtgattttctttggttctttgaacatatttgtaattgttgctttgaagtctttgctgagttcaacatctagactcagaaacagtttctattgcttacttggttttctgtgtatgaatgggttacactttcctgttgctttgcatgtctcataattttttgttgaaaactggacattttaaggaatatattgtacaacttgttattgattctgtcctctttcagggtttgatattgttgctgttgtttgcttggtcatttgtttagtgatgtgactaaactgactctagctaaactgactctatggagtctgttttccctgaagtgtgtaacttctgatatcagatttttttcttgttttaattttttatcctaggggtcacccctgggtgagagatcaaaggtcaacaattgatgaaatcttgtgcttaagcctctttgaccagtcagatttttgcccttgaacttttggcctcaagcaatcctcctgccttggcctcccaaagtgctgggattacaggtgtgaggcaccatgcctggcctttttgtaaattctagagagggtctcactattttgcccaggttggagtgatccacccacctcggcctcccaaactgctgggattacaggcatgagccaccgtgcccggccgccaccattacacttaatggtgaaaaactgaatgctttccccataaaactgtgtacgaagcaaagatatactctcactattgttattcaacatagtaatggaagttctagtcactgcaataaggcaaataaaataagaaaaagaaataaaaggcatatagattagaaaagaagaaataaaactacatctttctttctttttttaatatttaatgtattggatatgcacatgttttggaggctgctatcacagttcaaggagtttacatttttgccccacattcagccagaaactagcaggttggattttgattgcttctgagaggttggagccttgggtatgtatagagtcttccaggcagctaaggatgtgtgtaattttgcttttaagcctgtttgcccctgggtctgagtagctttattgctccatcagtgtttggccagaggttgtgctgaggtctttcgtactggtgaggcttcctcattttattgatggagccgtttgttgcttggggaatgttttcaaatctgccttacatcctgctctgattgctcatgagtgaatgtggcctagtgcatgtccacagccttcctaatccctggggttgacagtgaccccaagaggtatcttcttggatatatttttccctggaatagagcttcagcaacatgaaccttttcgagggtggatgttgagaaacctggaggtctgcctctcttggggtgaaattgtagtcttaaactggaaactgggaagaaaggggaccccatcttcttggccatacctgctgggggtagagcatctggaatagcattttcataagacagagctagggatgggggagggaatgagttgttgtccaaacaccacagactctcactgttcttaccaagatttagtagactttctcgattgaatatttttccatttgctgtatgcccttaggacaatttccagagactttaaatgattgttcattataatttcctctacttaagttgttttattggagaaagtgtacaccagccccttctctccaccattctagaagtcgtttcctaagttattttaaaatatactgtaactcctcagtataaagccaaatgttcttccttatcaattcttatttactccatgcacagccctaggaattttcctgggtgggtaacatggactctgtcgttaaggatttgtccagtggagtaaaaagaagcaaaacatcctgaatttgcttccctgtataagcagtgagggagtcctgctgtgtgcttaggccctggcctgcttctggggcctacacagggataggccctttgtattcaaggagccagaagaaacctcagtgggaggcaagcaagcagctcatcatcaagtaatttgctgtgtaatgtatgaattggggatgaaatggtgggtcgatgattcccacgacaatgctgtgtcagttcaggaggaggagagagaggagttcagaggcagatcctgaattggcagcctgagcccaggccttgaagaaccaggccttgagcctgggcctggggctgggatgttggcagaggaatgggggagtgtttagggaatgggggtccaggtgaggaagtcagcgaaaggataattatctgtggagcgtgcaggggctgtgaggaggccagcctggctggaaaggaaggctggactaagggatttccgtacatgaggttgagtagggtggtgagaccagaagccaagggcttggaatgtcaggctaaagcatttagacttgagtctaaaggtggcagaggaccaggtgcagtggcttatgcctgtaatcctaacactttgggagactgaggtggaaggatcttctgctcaagccaaactccatggctggagcacaggattttgggaccagcataggcaacacagtaagaccctgtctccacaaaggtaaaaataaaaataaaaaaaattagtcggttgtggtgaagcgtgcctgtaatctcagctgctctgtaggctgagacaggaggattgcttgagccagggaggtcgaggctctagtgagctgcagtcatgtcactgcactccagtctgggtggcagagcaagaccccatctctaaaaaataaataagtaaataaaggtggcagaggaacccttgaagattgctgaggtttgttaaggaaattcttctggctcctgtgtatggcatgcatggaggaggggagcctgtagccctgggaatgagtggaggctgtagtcataacccagaggcctcatcttggagccagtgacagaggtgactgagacagaagaatggccccccaggaatgaggaaggagtaggtgaggagccatccccaaggcttagtcaaggcagggcaagaagccccagttttttatccttagctcctgcgatatggtcagtggccagtggtagatatcagctctctcagagaaacccctctaggggaacagacaggagaactggttctccaagaggaaggcaagtagggagtgccctgggctccagagaaaggcagctagtggcttagaaatatggccagaaaaactggagggacagagtaagtggtctgcagtgcaggtggcaatcgttagagccacctggatgtcacatgtgagaccttcccctataaggttgtgcaggagttaaggaggttcttgtacttctgggcgtgacagcatcccatgtgctcagctctcccttcctttccaaggtttcatggggtgtaccagtgcctggaagactggagagacctgaataagagcatggcttctttgaggttcgtcttctgagtatagcacctccctccagtgccagcttgtggctctgtgtcttggccaaaaagttgagggtgaagccaagtctggcaaatagagcccaaggcttgggtgggaggaccaggagctgatttctctggaggccgtcattcttactgaagctgctccatggtgtcgctttcagagtgaaggctgattttgagtgtaacctggtttatatccagtctcagaatgacaccagaacagttttccagtttttgtatgtatcactagcatggtttgcttctgaagtatttattcttttatttttcaaaaggaggtagttattagatttctgaaaactgtaggatttgtttaaatgagtcacagcatttggctgaaatagagaggactccatctgttgcttttgcgtggtccccagttctgttctatgactgagctataagagaagcaggagaacttggtgttccctgagctcaccatcactggccctgcctgtctgacacaagccttgccctagtagagatgtgggaaagtgggccctgtttcctgagagcctctctacttgggacccctttaattagcctactgtgtttgggtgagttggggtaggggctggagccaagggctcctcatccactgaactccaccagctctttccttggagtgcccttgagtttgccccttggatcagaaagaggaacatccattgcagggtgatttcctcaggtcctcttgacctgctgtgctctgatgctctcctctgtgtccctggggcagcaggacaactcattctgactgaattcgccccagggcaactggcagtgcctcaggtcaggaagggtcatggagcatgaaacaatacaagggaaagggcaccagcttggggaaggagagacctaggtaccaatccttgctctgccttgctctgccttatatgtgtcacttcctctctttaaatttttttttttttttttttagccagagtctcactctgtctcccaggctggagtgcaatgacactgtcttggctcactgcaacctccgcctcctgggttcaagtgattctcttgcctcagcctcatgaaaagctgggattacaggcacacaccaccacgcccagctaatttttgtatttttagtagagatggggtttcaccatgttggccaggctggtcttgaacttctgacctcaagtgatccatccgcttggcctcccaaagtgctgggattacaggcgtgagccactgcagctggccctctctttaaatctcaatttcctcgtctagacctccagtgcagtgctgttatgaggatgattaactgatgggtgtaaaatgtctgtcgcatgctaagaaacgaccagtttctgatcttctcccatagtctggcctcctctcttctgcacactctgccccttcttcagatcacgctcatgggcagagtgaagggagaggtgtgctgtgagtcagggcatggcacggaagatgctgacatcccacgcagctccctgcagtgttgctcctggcacttcatgcttggccagcagattcagcctgacccacttggccatacctgcctctcactgggcagctggggcctggtcttccacatctgtggccagggctgggcccctcaagtcatgcccctccactgctggcccctcaaggacaaccagcctggaaacttgagggccgcaggtcccaccctgatgccttcctgctttgcgctaggcctggggaaagcctctgagctgtcacaggaagtgtgcttgcctctgtgactcacccacctcttgttggtggttgctacctggctactgtggaacctaggtaaactgttcctcctatggggccagttgaagtggtggtgagcagatgtcaccagccttgcccaattccttctttggttcctgacttcttagggtgtatcttaggagttgcctgctgaggttgccaccctaggcagtgtaggcctgttagattataccatgattattgaatgagcaaatgactggagctttgtctaagagggccctcatgtatgaggagtgctgagtagaccctatgggtcaggaagaggatgaaggtctgcaggtttgtgggtgtgttaggtgaagcctacctcatggtaggaacaaggtgaggatctctgcagtccattagaagggttctctgatcttacacggggattctctctttctctgtgaattcacatcatataaaattaaccaatttaaagtgaacaatccagtggtatttaatgcattcacaatattatgcaaccatcacctctatctagttccaaaccatttttgccaccccaaaagaaaaccccacactcattaagcagttgctccccattttcccctccccttctaaccactagtctgctttctgtctctatggatttatctattttggatagttcatataaatggaatcataaaataggtatccttttgtgcctggcttctcttacttggcctaatgtttttaaggttcatccacattgtagtatgcatgtatcagtacttcattgcttttgttttatcttgttttgttttatttattgtggtaaaatatatgtcacataaaatgtaccttttttttttcttctaaagagatggggtctcactatgttacccaggttggccttcaactcctgggctcaagtgatcctcctgcctcagcctcctgagtagctgggactacaggtacatgccactgtgcccagctcaaaatgtgtcattttaaccatttttaggtgtacagttcagtggtattagatacattcacattgttgtttagccatcaccaccatccatctccagaactttttcatcatcccaaacagaaactctgtacccattgaacagtagtaactccccattttcccccagctcatgataactactgttttagtttctatctctatgaatttgacaattctaggtacctcgtgtaagtggaattctacagtatttgtccttttgtgactggcaaatttcacttatcgtttcttgaaggttcatccatattgtagcatgtatcagaatttccttccttttaagggtcgaataatactccattgcatatatataacacattttttttacccattcatctatcagtggacatggttgctttcaccttttggctagtgtgaatgatgcatagattcttgagtactgcaacagcctggtggacagctggagcagggacatacatttgagcactggacaagatgctgaggtttcagaatgggtccaggaacacagtctgctcccatttcccaggcctcccacacctacatcccccacccctccccatatttcccctgactacaccccttcagccacactggcgtgcttgctgctccctacctgcaatccacaaccccgcctcaaagcctaagaccctgtcatttcttcctctgggatgtccttcccagggccttggcatggcctctcccaatatattaatatttgcaggctgggcgcggtagctcacgcctgtaatcccagcactttgggaggctgaggtgggcagatcacctgaggtcaggagtttgagaccagcttggccaacatggtgaaaccccatctctactaaaaatacaaaaattagccagacatggtggtgggtgcctgtaatcatagctacttgggaggctgaggcaggagaattgcttgaacctgggaggtggaggttgcagtggagaccatgccattgcactccagcctgggcaacaagagcgaaactctgtctcaaaaaaatatatatatacatatatatacatatatattttatatattatatattatattatatatatatatttataaatatatataatatataaatatatatttataaatatatatttaatatataaatatatattttatatatttatataatttatattttatatttatatataatatatattatatatattatataatatatattatatataatatatattatatattatatataatatatattatatattatataatatatataatatataatatatattatatatattttatataatatatattatatattatatatattatatatatttatatataatatatattatatataatatatatttatatataatatatattatatattatatatatttatatataatatatattatatattatatatatttatatataatatatattatatattatatataaatataatatatattacatatgtttaatatatattatatataatatatattaaatatatgtaatatatattatatataatatatataaaatatataacatataaatgtatataatatataaatataatatataaatatatataaaaatatatataatatataatatataaatatatttatatatataaatatattttgtataaatagatataaatatatatatttatatataatatatttatatctatttatatatagatataaatatatttatatctatatatatagatataaatatatttatatctatataaatagatataaatagatataaaaatctatttatatataaatatatataaatatataataaaatatatgtatttatataaataaaaaatatatatttatatatacatagaaatatatatttatataccataatatattatattatatataattataaatatattatataaaaatatataattttttatatataacatatataatatatacgtatatattatatataaatatatattatatatgtatatattatatataccatatattatatatgtatatattatatataaaatatatataatatatattaaaaatatatattatatatattaaaatatatatataatatatattaaaaatatatataatatatattaaaaatatatatatatttttggcatgactctgctctggtgtctccttttcagaagtgccccctgacccaccagggtagtttctctcctttctcattcatattgttcttctaagcacctatcatactctgaatgaattggacttacctatttgtcttcttgatctttgcttatatcctgcaccataaggcaagtcctatgaattgagtggccttgtgtgccttgctcactacgaggtagccagcatctgcagtgcagcccagtgccagggaccgtgaagctcccagtgaggacctgacatgcagtaaagccacacacttgtggtgctctggccaccattggagccctgaccccttccacctcccccttttgtatttggatctgtattcacatcctccatcccaggtaccccactctgttctctggaactatcaagctaccttgagtccccagcaccttccccagacattccttctgctgggtaaaaacctgaccatgccaaaatattatttgcaggctgggcacggtggctcacacctgtaatcccagcactttgggaggccgaggcgggcggatcacctgaggtcaggagttggagaccagcctggccaacatggtgaaaccccatctctactaaaaatacaaaaattagccggacatggtggtgggcgcctcagtttgcaatattctccttactccctcagcagggctgtgcagacccccatgcacttgcctgatcatctgggccagcggacctttgcatgagcttggctctcagaccctggtctctcctcttttgtcagacacaggccatacagttctaccattatctctcccttagcactgctgcctggacttctcattacttcctactactctgaagattttggcatcagaatccaggcttcctgcccactccacttgttgtcaagccagggaaggaagaaagggaggaaggcaaggctaatgtttttctcagtgcctactgggcatttggcactgtatttcctcatgctggggtggccctggtccctctgttggctcagtctggcccaggcattctgggtgtggtgattcagggctgggctagtccctcagagcacttgcccttctctttgggagcaggactgcttggcagtatattactcattagtcagtggctagcaacgtgccatgtagggtgtgatcacatatgctgtcacatgctcacacacacatgcacacagtgcatgtgcacactcacgtgtgagcacacactacacacacatgcacgtgtgcacacagtagttcatcacacttttttctcaggtcttaatcaccactctcaggcagatatttcctttatgacagcatctgtcttgatggaatttaggccacagtagctgaatttaatgctctcaatgtgtgaacacacgtcaggtaggaacatgggcatccctgaatctgtgctccctagatgctgagccctggaaaggggaagagagtagaggagggagctcctggtggtcagtataccagagggagggcctcttctcgtcaagggtgggtccagccacctgaaagggattgatggctccttggatgggaggttttggccttaggccaggccttcgtggctgttaccccacatcaggctgaacagtgagggggactgagaatcaatctctgaggtgggagggaagaatgggaggagggtatggagggatagaggtcctctcctgcgggaagcctctcactgggtggtctctgccagcgggaggcaatctccccaagtggccaatagtggaattgtccacagggagaatctagaaatgaacccccagcaccttcctgactctcacgggctgagagagaaggaaaggcaggagccaaagtgccacagataggtattagatttctccttctgagttagacccttcagaagtgaaaaacaaggaaaccacagaggaaagactgcatagttggcaagaaaggaaaacagaccaccatctatgtacatttttttgcaactaggctgacaggcatgtggaaccatggacacggtaatgtcaaaggctggaaagtggtggatggctttcctttttaaatgtcctttgatgttgcagtgggtattatttagaagaggagatgtttttcctgctggaatcttgagtctcagttactgtcttgagatggcatttttaaatcagtctcaacgtctttcataagccttataaaaaattgcattcaggcttggcgtggtggctcacgcctataatcccagcactttgggaggctgaggtgggtggatcacgaggtcaggagttcaagaccctcctggccaacatggtgaaaccctgtctctactaaaaatacaaaaactagctgggcatggtggcaggcgcctgtaatcccagctacttgagaggctgaggcaggagaattgcttgaacccaggaggcggaggttgcagtgagccgagatcgtgccactgcactctagcctgggtgatagagcaagactccgtctcgggaaaaaaaaaaaaaaagaattgcattcagtaggtcaatacgtccttagcatcagccctgtctgggcatttagcttcatgctgcatgcaggtgaggagagagagggaggccaaagggggcccacaagcacacaaggagccctcctgcatgaggccatgaaaagtctgcaggaaggcatagcagatttctgggaactgaggaatctggtgagggcccatagacggcaggatgcttaaaccaggttttgaaggttaaattgacttttttttttttttttttttttgagacagggtctcactctgtcacatagactggattgcagagcacagtggtgcaatcatagcttactgcaacctcaacctcctaggctcaagggatccatttgcctcaggctctcaagaagctgggaccacaggcacatgccaccatgcttggctaatttttttttttttttgtagagatgggatcttcctatgttgcccaggctggtttcaaactcctaggcacaagcgatcctcccacctcagcctcccaaagtgctgggactataggtgtgagccaccacacgcttggcctgaattggcttttaaggaaactgccttgtagaaagagaatagagcatgagctgttagaagttggggtcagatgaggagcctcaggtatccctgccaacggcactgcaggaagaggaaaaactgcctggataggaggagccacatggtagagtgctttgaaggctgtgggcaagggtgtccagggtcgggtggtaaccctgcatatgctgctgtgcctgacatgcatatggtgggattaggtgggaagagtgagcacttagcacaatataactggtatgagcgttcacacatgtgactatgattgtggcagctaccacaggaaagccaggcctttttcaaacaggctgtctgagtgagactcctaagcagggcctactctcatgtctctgtaccagacttcagagtcttttctcccccagacttgtctatcgtcagcctgggatgcccttgcaggccccgggattattgcagtgggtcctctgtgttctatgcccagtgtgccagccaccgctaccacacagagcctctgcttctctgatcaatcacccgagcccgtgggtcattcattccacaaacattcactgagccctgctctgggccaggccctgtgccaaactctgaggactctgtggtcactgtgtgtagaggaaagccagatggcccacttttctctggaaccacccctcttccccatggcttcctccagggttttctgagactctgccagtccacattgatttctccttctgggagcccccagaccactgacccctcccaccaaacacacacatgcacgttcaagttcccatgcttttgtatgtgatagatggagttttgtgtgtgagaacacttgctttgtattcttttgattgtaataaatttgaaattgcaaggcaaaggtagagttcagagggtttcattcttattttactacctgttatttctaggcgggtggatcacctgagatcaggagttcaagatctgcctggccaacatggcaaaaccccatctctactaaaaatacaaaaaattagctgggtgtggtcgctcaggcctgtaatcccagctactcaggaggctgagtcaggagaattgcttgaacctgggaggtggaggttgcagtgagccgagatcacaccactgcactccagcctgggcaacaagagcgaaatttcatctcaaaaaaaaaaaaaaaaaaaaaacaagtaggcctgatttctggacagagaagtttttaacatgggatgaatagatattagcttggtgtttctttctcccacaaaatagacaataggcattgttttttaattccactgacttcccattagaaaggtattaaggggtcccaggcagggtttccctggaagtctcaaacaggaggctctgggatgcctcatacactgggatgtttctggggccagtccagtcccctgagcacagcagatgttcagcaaattcatgcatgcatttagtgtctgcatagtgatgcagacattgggtgatcttgccaactgcattgttggcctgtatctctcttcctgtgcctagagcagggctgagtgtgaagtagacccttagccatctttgtgggctaaagatgtgtccaggcagcccctaagggcaggctgagtgctgagtctctcatcagtattgggtctgatgactggtcaggaacttgaggtttctgggtcaaagtcctggcttctgccctgtttggggcaggactatgggaagtggcttgcttcctccctagtcacaaaggcttgcagttttctcttagtttgtcttgacttccagattgtagcaaaattttgaagagagctgacaagcacagcattgtccccttggtaaaaggctgtagtagtaggatttgcagtagctggaacctgggaaaagctggctcagctttatgtaatgacttcagtctcccgatttgagcttcctagctttaggagctgacctaggtcagaacactgtgatgctgcacaacccaaagttgtatcatgcggggtcctaatgcaggtgtctataagcctggggctggctggggagcaggagcctccgtgacttgggctgcatcagaactcctgggctatacttgagagccatggtactcccagaagacgaggttgggaaatgtgaagagggctggcactggggccaaagctccttagaagtctgtggaaaggtggttgagaatttacctgtccagttagacgttccctcagaaagccgagcctagtaggggaacacatggagatacctggttggcctagaacactcttaaaaagtgccccagtcactgtagactggaaaggccaggaaggtcttagtgcaggaatgcactgtgacttctcagagaaatgtcaatgtcttgggttcttttggtttcccaggccagggtcatctggagagtctaggagatcatagggggagctcctcaaggagctgctgacctaggtcttggctctgggtagtgactctggcctggccatctgcctgccttctcttccctccctctatttctcttggctcccagcatgggctcccacctgtcctagctcccctaggaatttcctgctgatgagctattacccaagtctgatgactaagtaggaaaaaagacattttttccttccaaaaactgcaagaggaataagaaacagaaaagaaaactttaccttcaacaaaaataacaaacacctgtaacctgaaatacaacaaacaaagaatgattttttttttttttgagacagagtctcgttctgttgcccaggctggagtgcagtggtgcaatctcggctcactgcaagctccgcctcccgggttcacgccgtcctccttccccagcctcccaagtagctgggattacaggcgcatgccgccatgcctggctaattttttgtatttttagcagagatggggtttcactgtgttagccaggatggtctcgatctcctgaccttgtgatctgcctgcctcggcctcccaaagtgctgggattaaaggcgtgagccaccacgcctggccaaataatgatttttcaagtccaggatcaaaatcagtccaggatggaggattttaggaggggacacttgtcagagtccagagggccaaaacaaattatgatctattggactggttagcaaagccaacatatgcggataagcttagggagtatctttgagccctgtgtgatgccaaggagttactagggaggtggaattacccaaggaattgagcagggtgtggcaggtgaggggaaaactatgggttgccagcaattcagacaatagaaaaacaaaggaaattcaaaatgggtataattggtatctctggagaagagaacaaaacaaaaggaacacaaaaatattcaaagatataatggaagaaaactttccccctgaaataaaagaacacataaatcttttgtttgaaaggccaggggccaggcatggtggctcacacctgtaatcccagcactttgggaggccaaggcaggcagatcacctgaggtcaggagtttcagaccagcctgaccaacatggagaaaccccgtctctactaaaaatacaaaaactacctgggcatggtggcacatgcctataatcccagctacttgggaggctgaggcaggagaattgcttgaacctgggaggcggaggtagcagtgagtagagatagtgccattgcactccagactgggcaacaagagtgaaactccatctaaagaaaacaacaacaacaacaacaaaaaaggccagactgaattttgaaaaacacacatattcaacccaaaaacgtatcttggtggtgtcactcaattccaaagagaaaaaaatagctctattgcatccagaggggaaaagtttatatatatatatatacacacacagagcgagagagagagagagagagagagagagagagagagagagagagagaagggctggcccagagctctccacagtaataatcaacgacagaaaacagaggggctagctatatctctgaagtcctgagggagagaaagtgtaaacccagaatttatatccagccaacctgttgttcaagtttttattattattattattattatttttttttgagacagagtttttgctctgttgcccaggcaggagtggagtggtgcagtctcagctcactgcaacctccacctcctgagttcaagcgattcttctgcctcaacctcccaagtagctgggactacaggtgtgtgccaccaggcctggctaattttctttttttttttttgtagttttggtagagatggggtttctccatgttggccaggctggtctcaaactcctgacttcaagtgatccacctgccttggcctcccaaagtgctgggattacaggcatgaaccgccatgcccagctgtagttcaagtgtaaaggtcatgaagatgcgttcagacattcaagaactcaggaaacgtggtttctatgagttctttttaaatgaatgaatgaataaaaacttctagagataaattccctaagacatacatggagatgctgtgattaaaggagtagtaacctcaccactacttacttgccctcagatgagccgtcattcacacagtgcttgtcaccggcaccatggtgcaagagacattcagtcttttttttttttttttttttttttgtgagacggagtctcgctctgtcgcccaggccagagtgcagtggcttgatctcggctcactgcaagctctgcctcccaggttcatgccattctcctgtctcagcctcccaagtagctgggactacagatgcccgccaccacgcccagctaattttttgtatttttagtagagacagggtttcaccgtgttagccaggatggtcttgatctcctgacctcgtgatccacccgccttggcctaccaaagtgctgggattacaggcgtgagccaccgcgcccggccgacattcagtctttaaagttatactgaactcatggcatttgacacgtcagctgactggtggccacatatagctcttgctattctggaaaagccatgggatagaggtaaaaatgggactgaggggaagatcaaaggtaaacgccacatgaaccactactgtatacctactggtctctttctagaatttggcctgaggtgggcctggtgcaattcttagtgagacactacaagaatatggatgtcacttgaggcaggtctaagggtttggttttgttctacatcatggatgacaagtccatggcctttgtgcttaattgatggtgacaatctttcccatgaatccttcccaagcccacctcccaggtggtcactaccaatttattggggttaaaggaaagttacccttatgttacccttatttcctatccttgctctggattctggagactagctggtcccagaggaaaccaaaagcaaatcaattttccctgaaagatgttctcaatctagtagacccactcaggccccagggctggggaatgaggtccccaaggtttacttttgtggcatttgtggcctggattccccttgctttcagactcctggtggtctccccgtctgatgctggcagcttcttctagcctatgtttaatggcagcaagtcttgttcctaccagtccctcttgtcacattctccccttgctgacccacctgcagtctcatgctggactctttctctcagcaacatcagagcagtcagagctcactgccttaaacatgttctcttctggcccaaacaggctggcctggaacaaattgagccttgttatttggccacaggaagagtcccacctgccagacatttctgagtggaaaggatgagtggaggtggcaggtacctggtaacactgatggttccttcatgtgggtttgtctgctcaggggtgttgagtgcatgtctgcccaagtgcatcagtatacacctggcgtcactggtgtatactgatgcatggccaccatggtgctttgtccccagctctaccaaggacctagctctctgggttactctggggtcttttgagtcttggaaacttaccatcagagtgggactacaacataaaggggctgggaagttaggaagagaagatgtcggcctcaagggagctctgcctatggcatgacctctcaccctgcccaggaaccctgggtgtggtaccttccctctccagccagcagacagcaccttagaggctttgagcccatgatgccatcttcttgggcaatcacaggctctttctgtggctgtggctgcgttttatggagatccttacctttgtgctattgccgtcagcactgcaaattctttttggcccctaggacaatcaggaagctgatgaggccagcccttgatggctgggggcctccctgtcactgacctaagtacactttccatggagcctggtggagggtaggactgaatctggtctgggaaaccaacagagactattttaaggactggcgattaagagtgtaagaattttcttagcagtggcctcaactaggacacatatgccaaggggttgaggaatacgggagggacaaggcagaacatatggaaatttctgtttatatttattgtctatctcatcttttaaaacttttccacttggggaggtgggttttataaaaaatatgcatttatataattggtagatgaatattcatatgttggagatgctgaaacatgttgtattgatagaggcacatgattaaaaaggcaggaggccactggcttgaaggctgggcaggccaggatatgttttcttgtgcaaaaactggaatttttttctaagcctaaactttctagattctcatatccattcctgagagagaagctctaggacactggacctggccccagcacccactgctctacagcctctgctttgctgcctgggtgcacaggaaccactggcgtggcccagtagtccttcctgccctgggactcaaaggagagggtcctcccacagcatctgcccatccctaattgcccattacagaaaggtcagccatgaattcatcaaaacctcttttgaagctgtggggctcttctggccactctgacttagagaaacagtttctttaagttcactcccctcctggtgagcaaagacagccatttattaatggaaaacatttctttcaaatcctcaactgaaggcggtggggggcatgctctggaatgctgccttgtggggcccagcttggttttccctctggcgcctgcactggctccatgcctggctgcttttccgtctggtctgaatcagcctggtcaggccctccttcccactgtgcaccagggcagccacatctctcctggtggttctgccattatggacgtcactggtgtctgaagcattttttagtcactgacgctggcctcgtgcctttctgggggcttctgacagaggggagcccagcctctcaccagtgcaatcaggattatgtctcccagcagtggtcctgggatgggacaggaggccacagggtactaaggattggtgggggagaggctaactgaattttctctgttcccgttcccagcagccctcctgtggccagggggctccttcctgccttggcaaacagctctgagttaagattgtttctgatcagctaatagccttaaatgctgaaaggaagaaaagctggtagaaatctggctgtttgtacattgtttacctttcttggccatcttaaaaatatatttgtcccaatatctaatgcatgtggggcttaaaacctagatgacgggttaataggtgtagcaaaccaccatggcacatgtatacctatgtaacaaacctgcacgttctgcacatgtgtcccagaacttaaagtaaaataaaaaataaaataaatatatataatatatatatatatatatatatataattttataatttgtccctagataaggcatttctagtcttccctgtttgacttctagccactccttcatctctctgcccttcctgtctcttgtgtctcctttatggcggcacccctctcccctccttgcttacacacccttaccctggccctccccagcaataggactcccatggctgctgggaggagcagtggcctcaaggggcctctctgctgatgaggccacatccacaagaccaagtcttccttggggtgggctgggtcctgcctgtggacacctccctctctttttcctcattcccttctttctcctgcccagcggccatattttggcggagacctttgtttgtgtctcttaagaagagcctcctggagggcttacctcttccctcctgaggaggccttggacgggtgtagtcactgtggctctcatggaatgtgtgttcaggtgtgtggtacagacagttatgacccctggagctcctgccacggtgggcccttgtgttcagctggagaaggaactggcccctcccaagctggactggtttgggacagggcttgggcatttatggtgtgtggcactcataggtgtagcctttcttcctgtgacttctcggctttcacatacgtagactcatcatggcatggggcattgttgagtgctcctcctcatgggaacttctataaccctgtggggtcattctcttttttctcctttccctgacttctctggttctgacatctcctctactcctatgaactttggtcctccccacaaagctttctgggtgatttctagcctgagaattgtctgtgaacaagacctgtaactctcccagataaaaatatctacacttatctgaattgaactgaagctgtgacccatctcttaatgtctcttaccccctacccccacctcaacacaaccaaaccaaacccaaacttgtgattttgtgatttcgcttcccatttcttacccactaattgacttctctccctggattccccatctcaattaaaaggaacactcctccctggagccaaagccagaatacctgctgctgtaccttcccttcctcttgccacacagactatctcctgggccagtgccttattctcactggtttcctacctcatcatcttcttctccttgaagagaccctaaacattcccctatgtgaaaaccttacaggctgtgctcattttagcttttagcttcccaattagctcaggtagttcaacacacactatcacacgattgctgggagctgttctaggtgctgggagcaccaatgacttacgtcttccaagcttatcctgcgtagctactcagactgagcatgctctgctgtgcctctgggtcttcgtgcatgctgttgcctctgcctagcatgccctgtcaccttggcatgaacagctcatcttttaagacccagtttaaatgtcttctcatcctcaaagacttctgcctctgtccatcactggaccatgcagcagtgtgtcttgcagggatttgtttgcacatctgtctctactctagaccagaggctcttggaggactggactcctatatgaatcattttttaaaaaaatattttaattaaatattaaatgactttataaagaatataagaatacctatacaacatgtataagatgtgaagaataaaatatgaacacctgtggacccaccttccattgaagagatatcattcctttataccatcaatacctattatagggcctggaactaatccaggggtcagtaaatgtgaattcctgaatgaatgaatgaataaatatctattgttggagtcattttctctctgagtctcccagcgttgctagttaagtcccaggtgaatggtgtcatggccctagcccagccccactctgtgagctcattctactgttcacacattgttctggttgttgtgcatgtgcttactgagtgtccattcaatgccaagcgtggcgctgggtcctaaggatatagtggggagcaaaatggtgaaacctcttcccagggagcttccacgtaagcagctcttcagaaaaaataatccaaagaacccaaactgcaatgctttctaccccctctacagctaccctagaaaggcagtgtgggatgtggttaaggacatggactggtggcctagatattggaatcccagctccaccatttgcaagtcatgatggctttgtatgttacttaacttttatgtgtggcagttttctcatctgtaaaatgggcaaaatagatcctatccagtgaatttgctgtgaggcttaaagcagttactatgtgacaggtggctcatggtgagggctcggtcagcattaccacaattattgtcagcagagccttctatggtacggctgggggtgtagccaactgctatagggaggaactttaggtattgttcctgaagttctctcctgcatgaagtcagacccagagaagggccgagtgtcatgccaggcacttgccgtgtttcctcagctttaaaactttggggccacattttactgctctgagtcatttagtgcttacagtcaccccattcaggaaataaatattgagcatccagtttgtgccaggcactgtggtaggccctgggacacagctgtgaggaaagcacacggagactgtgcccacacagaactggcagtttaatgcagggatcccaaaggatatacaaaagcaataaatttgttatatgatgggtcagaaggtgctcagtgccacagagaacaaagaggcaggggagacaagcacagttttaaatagattcagggtaagtgtccctgaaaggatgccaccagagcaaaaacttgagagggagcaagtgtctgcagaaagaacagcaaatccgaggcgggcggatcacaaggtcaggagttcaagaccaacctggccaatatggtgaaacctcgtgtctactaaaaatacaaaaatcagctgggcatggtggcacatgcctgtagtcccagctacttgggaggctgagacagaagaattgcttgaacccgggaggcggaggttgccgtgagctgagatcgcagcactgtactccagcctgggcgacagagtgagactccgtctcaaaaacaaaacaaaactaaagaaaaaaaaaagaaaaaaaaaacaaagaacagcaaatccaatggccaaatgcacatgtcaggagtgggcctggcataagggaagtggaatcagggagaggataatcagagatgaggccagagggaaaggggcaaaatctcatggggccttatgggccattgtaagacttttggcttttcctttgggagggaaaggaagccagtgcagggcttaagcaaagcagagaagtggcctgacttgtgtatttaaagccttattctggggctgggcttggtggctcatgcctgtaatcccagcattttgggaggctgaggtgggcggatcacttgaggtcaggagttcaaagcctggccaacatggcgaaactccgactctactaaaaatacaaaaaattagcgaagcatgctggtgtgcgcctgtagtcccagctacattgcagtgagccgagattgcatcactgcgctccagcctgggcaacagaaggagactcacacacacacacacaaaaagacttatcctggcaactgagaatggctcaaaccaggtggggtgaggaggagggagtaggtagtagtggccagcttcagaaaccaacaagatatactgctggattgacttaggatgagacaggaagggaggcagagacggcaccaagggggagactaggaggcccacatttagggggaagatcaggggctcagcttgggtgtatcaaggtggagatgcctacagggcatctctgtgaagatgtggagttggcagttagacaggtgaagagttcagagcagagttctgggccagagatagacatttggtgggtatcagtggaaagtggatttaaagccctgagactgggtaagtcttgagacttagggattgtgagtactcacagaagcacgtttgtgtaaagactgagccctgggtctctccagtgtaaggagtggtgttctggggttggcagatgaggaagaatctgcagaagagattagaaaggtgtggccaggcaggaggaggaaattcaggagaaggtggtattcccgaaggcaaatagtgaacttatttcaggaagaagggagtgatcacccaggatcaagtgctgctgatggtcaaatgagatgaggaactgagatgtgactgtcggatttgatgatgtggaggtccctactgactgtgacctgagtaatgtctgtggagtgatgggcaaaagccaggttggaggggtaggttgagagggagagaggagaggagtgggaggtagtgagtggaggcagttcttttattatttattttagagacagagtcttgctctgtcactcaggctggagcacagcagcgtcgtcctagcttaccgtaaccttgatctcctgggctcaagagatcctcctgcctcagtctcccaagttgggattatgacttggcaacctggcaagtcaccttgccaggcaagtggagataattattttaaggagttttgctgtaaagaagaggagagaaatggggcagtagctgaaggagtagtggagcaaagtactgctgcttctacttttttgttgtttaggatgggagaagcttgtttgtatgataattgaaatgatccaatagagagggggaaatggatgatgaaggataggggagaatttgtgaaggtgagaagtgggccttgggattgggaggcaggtgaacactgggggacaggagtagggaggctgaggttgtgcaggtttcttctggtgggtcccactttttttgtgagatggtcagcaggtcatcagtggcagttaagagacaaaaggaggtgtttggaagcttgaagatcaaggagaggatataaggaagcatctaggaagatgggagaatacaaagaccgtggacatatatcgcgatctccaggtgtcatgatggctaccatgaggtgtgtgggtgcacatcaatgccaggaacactgcccttgcatgcagactttgctgggtgcagaagacattgcttgtttattcactgtcaccacagctgagtttagaaccctaaatgtctccagaaagactatattgtgatacaacattgatttaaaaagtcactgtatatatagattgcctgctacttattgggcaacacaaatacaatagaaatggctacatttctcagaaggcttgcaccacctggagagggggccacagcccattcacatgttgtaaaaagctctcagtagcttctgatttgctttcaagggctgcctttaaactccagtcttaaataatttatgtaaaaaatgaaactattaatttggacaagtgggaaatatttctttaggatacctagaaattagtatactgaaagggcccagagaagcccaggttcccagtgtgggccactgatgctgtggccaccaccatgctaggcttcacagctggtggcaaagatggccctgaggggttggactcaaactctggttgtcttgctgaagaagcaattggcgggtctgtgactggatagttaggtctgtgccactgatggttgatgacaggaatgttaaacactatttaatagtgtttcttttttttaggagagtctttattagaccaaggatatgtttctctacccgccagttcctcagaagggaggaaggattgcagagtatcttggggtgggtgtccccaggcgggctcctcatcttccccctgaaatggcttgttctaagctgccctatcagttggctcttaaatctttttggcaagcagatggccttcagatgggggcagcaaacttagaatcttctcctggggcactgaggcagcagctaccagggcagtctcctgcacaggctgggcctccacactgctctcagcaagtcagccctgtttcctgagtgccagcattcaccccaatgagtacagactaaagcagggagagaatttcagggaagcagtataaagcattgtctttggctttttgtgctcatcctctttcaaactggaaaagaggaaaattgcagagatgaacttaagttgggtcaaaggagaaggaatatatgattgacatttagcctgacagtttgctttctacctcatggaactacccaacactgttggctcctttgcagccagattgggatggaggtgagggttagatgcattggacctcactcagtggttcctcaaggctggatcctggaactccagccccacccagcttcacactagtggaaaagtaacactttatcccatcttggtagatttggtctggcatcaggcttgccagagggctaccagaaggaaggctcctttgtgtagaggcaggcccctgatacaggagatggcattaactaggcattgcagtatcccccatccccagcaatctagggtcagcctctgaaggggttcaaggcaggatatagcagattggccagtatggtatctcaatatagtaacttgggctcatgttggaatcacctagggaggaaaaaatactaatgccagggtcctgcctccatagatttttatgtaattcgactgaggtgcagtctgggagtcggaattttaaaaatcaccctaggtatttctttcttttctttttttttgaaatggagtctcgctctgttgcccaggctggagtgcagtggcacgatcttggctcactgcaagctccacctcccgggttcacgccattcttctgcctcagcctcccaagtagctgggcctacaggcgcccaccaccacacctggctaattttttgtatttttagtagagacggggtttcacccatgttggccaggatggtttcgatctcccgacctcttgatgtgcccgcctcggcctcccaaagtgcggggattccaggcgtgagccaacgtgcccagccttttttttttttttttttttttttttttttagacagggtctcactctgttgcccaggctggagttcagtggcacgatctctgctcactgcaacctctgcctcctgggttcaagtgattctcccacctcagcctcccatgtagctgggtttacaggtgtgcgccaccaagctcagctaatttttgtatttttagtagagatggggtttcaccatgttgggcaggctggtcttgaacttctgacctcaagtgatctacctgccttggcctcccaaagtgctgggattacaggcttgagccaccatacctggcccatcccagttatttctaacatgtaggtttagaatcttggtattcaaagcatgggcctcagatgagagtattggcatcaccttagagcttcttacaatgcaggccctactcagatctactgaatcagagtctgtactttatcagaatgtgagaggacatgttttaatcctgcctcatgccctggtgccaagggttcaagttggagatgcttgtcaaggctcagcacaggacacagcaaatgagggccatgatgattcttctgggcaggaggaagagggtggtgatggggcttggcagggtcacctagcttggtagagacctccgcaagctgcttctctaagctgtatctctaacagtcattttcaatgtcatttcagcacttcccggagactggaccccaaggaacccctgggtaaccagagagcagcttccccaactccgaagcaggcttctgctaccactcctggccatgagagcccccgagagacaagggcacagggaccagcaggccaggaggctgatggtccccgcaggacgctgcaggtagacagcaggacacagagatcagggcggtccccctcagtgtcaccggacagaggcagcacccccacatcaccctactccgtccctcagatcgccccccttcccagcagcacgctgtgtcccatatgcaagacttcggacctcacgtcgacccccagccagccaaacttcaacacctgcacccagtgtcacaacaaggtctgcaaccagtgtgggttcaaccccaaccctcatctcacccaggtaaccacttctgcgccggctccccactcacctgctacctcattaccatacctcccctggttcccttcccctctttcaccaactctcttttcctggtcatttcccttgaccaccagcatttgtgtcctcctgcagggatgtgtcctggttccaggatgtggcagcaaagaacagggcctggccccagatctcccaagggatttctgcatcccctgaaagcttgggtagagtctgagagtagaagatactttctaacctggtccaagtttggtctggaaaaatggccttcgagaggaccaaagacaatcttatgaacaatttttcccaatggaactcatttggagtgggccatgagcagctctaggacacagagggaggcaaatttccctgatctaggccaggaggcctctgtctttgacagcaggccctagatggggatgctggtgaggggagaaaagtttcaggggaggcaggaaactgccttccagctgggctctgggaagcacctcttcttggctttagttctagtcagctggggacctgaggtggtggggcagctaccccatccctaaagaaatgaccttggggtaaagaaccaggctgggaaccaagcattcaccaaggatgacagtgtcctacactcaccaagaggccactgtaggaccatttctgtgagtttggcttctttttcgcccaagaggacaagaggactctgggtccacagccccagcctggctttgttcaggatgctttgaatgactgtgggatgtctcaccaaatgagttggggccatcgctttaaaatgaacagagtaggtctgctgatttcctcctactcctctgggagtagaagcctctgtttctccccacaagaatccgtctttggataggatggagagaggctggctgcaggcacgggcatggctgcctctgggattaacagcagctggagccgtttggaccatgtgggagggggctgagtgagaataattgttcacaggtcagggtctatatatgccatgaggtgctgtgggtgtgggacgtgtggtttgtgagaggtaagtgtgagattctgaggaaggagctgtcggtgtggggagatgactcagtgcctttggagttgctcctggagtgtgggggcttcctgaagaggcgtgcatgctcgtgattattgcatctgtgattagaaacaggccatcctgcactgttcagttaggtaagtgcttgctgttcagaatttggaacaatacgattaaggccagggaagctcacctgtgtgtttctgccagtgagaagccagaagcccctcacaggaacagggaggcttggcaggtggactgtaccgctatgggacatcccctcctcatgctggccttgcccctctgggttccagctcccttgagatgcagcacagcacctggacaactccgagtgaggtgggtggggataaggaagagccacacatggtggccccaggctcctggtgggcatcccattcctcaccaaaccatggcccctgcctataggctctccaagcccaggaccttcaatgaggtgggaagggagccagcctttggctgtgcctggaaaaacagcagagtaggaagaccttggagacactcagtccatctgcctcattgtgctgggaggaagctgaggctcagggccaggagaagatggggcctcacacttacttcagatccatagtgtttggtgaagagtgggtctcagccaaatacttcaaacaaatgctgggctggacaaatgaaatgtttctttgctgtgagattcctcaggattttcagtgtcctgaggggcatcacagagttccaggacagggctatggttggcagcctttcccagacttgctttcacagaacatcttaggagctgctgttccatggcacccagtttgggaattgctgacctggtcccttctccaagttcacacatggtgaatacccttctctgctggggttttcaggtagaaccttcgcttctctagagttggctttcagtggtgttcttgttaaggaaaaaataatccttggcacatcttcctgaggggtgataaagcataattcgtgaaccagtgcagttgctctttgtcactttgctaagagcaggttcaccttcctggtcatgcttccatgtgatgagaaaacaggtttgcaggctttgctcacacacctgctgttagatctgtcctagtcagactacatctgtcctggccacttctaacttgatgttatgtcagtcaagaaggctgggattgccctggtgtctctgggctgaactcctgcctggcctgagattctgggcatgtgtaaggggctggttctgaagttaggtgtctgggtgggtgatggggtcagagagagtgaccttttccaggaaactcagctacagcactcactttctttttcagttcctcacttcccaggagtggcccaatcagagtagaaaaaggtagaggtactgccagtcccagcgcagatgcactgcagacactggcaactggagagtgtcctggggatcctgtgtgggctgggtagtatgcctggagctgctagtatagtcacgctgagcctggttgaggaggtccagcagcctgggtgctgtgtccagggcgtgtcggcaggatgcgttgttcctcagcttcccagtggacagagggatatagcagtcccagagaaggacgtgggccacacaagtgacatggaggctttcagggcatctccaagatgactagtgaaactgtgcttggaactttgaaatgtgaccgcagaaaatggaactttgttcatgtgtgtcactaatagagacttactggctggtttggaactcaagctgctgtgtagatctggagtgtgattgaacagttgtgccgaatggctgcatgaggacaaatgcacagaaaggagggaaagaacttggccccactgggcagtggtcaccaggacttggtgtttttgtttttgtgtatgatggcatcagtcagagttattactttagctgagtgctgcagaaacagcagatgagatctggagatgggaatcacacacagttagctccatttggctagcagcagtgtctgagatctggaatcactgtttttctggccagcggacccaagtttcccctatcagccctaggctgctggaggtctactacacttacacagacagacatggtactcaccattctgcccatccagcagagagcaggaggcctgcccatgtagtttgctgggtttctgagtgcctagagcatgttgagactgtatggaaattggggaaggagctcagagcacagtccctgtttacagatgaggagactgagtcttaggaagtcttggcttattctgggttattctggagcaaaagagctgtggatctagaccagtggcttggtctccagctttcccccagggatttgcagcctcattttccccatccatagtccattttgctaaggctgaagctggttcagaacaaatagggcagtcccagatactcttcttggtggaggccatttctttctggatatccccagtcctcgtagctcagggcaagcgagtaatttaacctgtccgaaaccacagagaaagactgggtgtttctgtttgaggcctgaacatttctcaccacccacaagagaccctccctctgacaatgcactgatgccagggggccagaggtgttagcattcagtccttactgacaaggagaaggcaggaagaccattctccttttctctctgtagatgtggggttttggacaaatacttgaatttcctgaatgtcagatttctctgaaggaaaagcaggattccaaggattggcatcagtgcctttgctaatgcccatgcctgctcaggcctgctagtccacctttccgttcttcagtgacttacatgtgggcccgccacccctttctgcaccagaagggtggcccgtgttgcccttgttaggcttctattctgacagttgggggtgggagggagacaaggcatgggcctgagcctgctaagtagaagatgagaagatgcagttggggtgggcagtggggatgggagtgagttgctggggaatatgaaccgtggcctggggcaggcatagcctgcttctataggcttctcagggacttccatgccccactcagagcagccccagaagcacatcctggcctggagctcctgcagatgccagtctgtcctcatcctcagaacagcatcccaggagtgactgcggtgcagaggcagggttgcctgcatgcccgagcctccagtctgatcagctgaatcctcccagagcaccatctagagtgaaggggcccacgctctgcccctgtggggagcagcagggctgccaccccatccccagccttccaggccaaggtggtccatctgcctcccaccacccttgctctagtcagaattacttataagcctctctaggaaaactacagaggagtaagcatggtcttacctcatccattccaaggtctggactttgctgaggccaagccaaggatatttaacccataccatccccaactcctacccaatggcaaaccatgagcctacgcagtttcccagggtgggcggcgtggagaagggagggagacagtgcagtggctccgagcctctctctcccctgcctgcatcccactgctttccggcaagggccagggctccagatggctcgggggtggtgctgtgagttcagtacagatccctctgctacagccagcagccttgtctcattccctctactccctcctggccacactgccacctgggccagagaggaatgaggagcaggtttcaggacatgggaccagcagtgtactgaggggaggtaaaggtgtcttccgctttcctgggcccaggagggtgtctgcccagccttccaatgctcacctccaaacaaaatggaagtggatctccaggtggcaggcccttcaggaggcctttctcccaccgaatagctagtccttgggcagtttgctttagagtagccactttgacctaaacagtctccaagtcaatagagaaatactctccaaactttagtcactctggagcagccagccctgttgcttagtacatgccccgaagtggtccatgttcccagaagacaggacctttggcctgcttacttgcttggaccactgcagggtggaggccacagccactggggccgtgaggagacaacaggcatggaattctaccttttagttatggaagagggccataagttaagctaagaatgaatgtaaaattaattcagatctgaaaataagaaattttactcctaaaacacttgttttcatatctaagggcaaaggaaacagaataaaaagaaaatgcagtaaaaatggtagagaaaaaaagaaatccatgaataaagtaggagttggaagaagtggaagaaggcacaagaaggggaggcaggaaagggaggtgatggaaagagagccagaggcaggaagaggcagggaccaggaaatcttggtaaagttcccagttgctggctggtaacctgttggttttgctgcttctactctttattttgctcagcctttggcctggacaggcatgtttaacccactgagtcagagggcagccctctcccttcttcctgtccttgcctccctccacagtgcttttcagtcctattgatagccgggaactgtcccagacactggagaaacaggtagaaatgaagcagatgtgctgctcagctctgtgaagccttcagaccagtgcaggaggcaccactgccaccaagaaccacacaagcaaacacacaatcacatctggggtcaaggaggggagggctatggcgggtgctgttggtacgatgctgagacaagattcctgggggtagttgggcatggtggctcacacctgtaatcccaacactttgagcagctgaggtgggcagatcacttgagcccaggagttcaagactagtctgggcaacatggcgaaaccccatctctacaaaaaaaatacatggtgcaaagatacatggtggtgcatgcctgtagtcccaagtatttgggaggctgaggtcagaagatcacttgagcctgggaaaatctaggctacatgagccatgatcatgccactgccctccagccagggtgacagagtaagactctgtctcaaaaaaaaaaaaaaaaaagttattgggggcttctccaaagagagcattaggctgtagaatgtcagaattgctggatgggaggcagttggaaaaagaggaggcctgaggggatgtgctttgttcatgtgagggttcaggagcaaaggtccaggacagctgtaccacaggacaggaccagaaggcatgcaggtcctgctgggcttgctggggtctcctgatgcactcccaaggtttgggaaggtggcagtaggaaggtcagatgtgcatttaaaacacccctctgatgcaatctcaagggcccttcaaatagccaaaataattgtgaaaaagaagaacaaagctgaagaactcacacttcctgatttcaaaacttactacaaagttacggtaatcaaaacagtgtggtactggcatagagacatatagaccaatagagtagaatacgtagcccagaaataaaccctcacatatacggtcagatgatttttgataagagtgccaagaccattcagtagggaaagaacaatcttttcaacaaatggtgttgggaaaactggatatctacatgcaaaaaaatgaagttggaccttttccttacatcatatacaaaaattaactcaaaatagatcaaatacctaaacataagagctaaaactataaaactcttagaagacaacataggggataagcttcacaacattggatttggcagtggtttcttggatatgacaccaacagcacaggcaacaaaagaaaaaatagacaaaatagacttcatgaaaatttaaaaattttttacatctaaaggcactattaacagagtaaaaaggcaacccacagaatgggagaaaatacttgctaattatatatttgataagggattgatatccagaatatacagagaagtcttacaactcaacaacagaaataaacaaacaaaaacccaattaaaagtgggcaaagaggccaggcgcagtggctcatgcctgtaatcccaggactttgggaggctcaggcaggcagattgcctgagctcaggagtttgagaccagcttgggcaacatggtgaagccccatctctactaaaaataaaaaaataagccagacgtggtggtgggcacctgtgctcccagctgctcgggtggctgaggcaggagaatcgcttgagcccaggaggcggaggttgcagtgaatcaagatcgcactactgggtgacagagccagactgtgtctaaaaaaaaagtgggggggagcaaagaggagtcaggtgtggtgatacacacctgtcttcccagatacttgagaggctaaggtgggagggtatcctgagcctaggagtttgagaccagcctaggcaaatagctagaacctgtctctgaaaaacaaaatgggcaaaggacttgaagaaacatttctccaaggaagatatacaaatggctaataactccctaaaagatactcaacataggtcggctatggtggctcacacctgtaatcctagcactttgggaggctgaggcgggtggatcacctgaggtcaagagtttgagactggccaacatggagaaactctgtctctactgaaaatacaaaagttagctgggtgtggtggtgggcacttgtaatcctagctgctcaggaggctgaggcaggagaatcgcttgaacctaggaggtggaggttgcagtgagccaagatcacgccactgcactccagcctggacaactgagcgagactctgtctcaaaaaaaaaaaaaagaaaaaaagaaaagatactcaacatgactaatcattagagaaattcaaattgaaactacggtgagataccatctcatactcgttaaggatggctgctgtaaaaataaataaataaatgttggcaagaatgtggagaaattggaacccttgtgcactgtttttaggaatgtaaaatggtacagccactctggaaaacagtatggcagttcctcaaaaaattataaatagaattaccatatgatccaacaattccacttctgggtatacactcaaatgaattgaaaggaaggtcttgaagagatatttgtacacccatgttcacagcagcatttttcacaatagctaaaatgtgaaaacaaccaacagcccattgacaaatgagcaaatatgcaaaatatatgtatatacatacatacacacaacgaaatatcattcagccttaaagaggaaggacaatctgacacatgatacaacacggacgaaccttaaggacattatgctaagtgaaataagccagtcacaaaaagacaaatatgaggtggtcagagtagtcaaagtcacagagacagaaagtagaatggtagttgtcaagagctggaggaagaggggagccgggtgcagtggctcatgcctgtaatcccagcactttgggaggccgaggcaggcggatcacaaggtcaggagatcgagaccatcttggccaacatggtgaaaccccatctctactaaaatacaaaaaaaaattagcggggtgtgttggcccatgcctgtagtcccagctacttgggaggctgaggcaggggaattgcttgaacccaggaggcggaggttgcagtgagctgagatagtgccactgcactccagcctgatgacagagcaagactctgcctttaaaaaaaaaaaaaaagagctggaggaagggggaatggggagtttcacgggtacagtttcagatttgcaagatggaaagaattacgaagatgaatggtggtgatggttgtacagcattatgaatacaataccactgacctgtacacttaaaaatggttaaggtagtaaatttatgtgtattttaccacaataaaaacaatgcaaaattttttttttatttgttcatttgagatggagtctcgctttgtcgcccaggctcaagtgcagtgatgcaatcttggctcacggcaacctctacctccagcctcccaagtagctgggattacaggcatgtgccaccacacccggctaagttttgtatttttagtagaaatggggtttcaccacattggccagtctggtctcgaaatcctgacctcaagtgatccacacgcctcaccctcccaaagtgctgggattacaggcgtgagccgcagtgtccggccaaaaataatgctaattttaaaaaccctctggaaatagacagaggtgatggttacacattatgaattattaatgccactgaattgtatactttaagatggttaaaattacaatttaatatttattttaacacacactatatatgtgtgtgcatatatatacatatacactaaaacaacacatacacatacacacacatatatatacacccctcccccgcccagctgctatgtgaagaacagcctgcaggggtagcgggtgggctctgggagccagagtggcagagggggctgaggctgaggctggggtagtggtgatgatgactgcgaagagccatgatagattcctggtgtgtttgggtggctaaacagacagaattggattggatgtggagggtaggagatggagatagagaatttttctgtttgggccattgccaagttgaaggtgcctgacaaatctaagaccctggcatgaaacaggcaggttgggatggagacttttgtttcatattcacaagcatatagtgacatttaaagtgccataggagagatgtggacagagagaagaggtgtcaggatctgggctccccagcactgagaagaacccagcaaaggtggctggcaaggataagcaaagaagagtagaaaggccagcaagtggagggccaagggatccaggaggggagaatatctgagcagtagtggggagtcaactgccaagagcccatcacaggagctcttgatgccttgctgggtggagcaaaacagaacaaccaggttgacaagtcatttttacccccaacctcaagttatgaatattttcaagcctacaaaattgttgaaagaattgtacaaggaacacccacaaagccactatctggatttataatgaacccctcctctcctggctttatcacgtatccattctaccatctatttgttcttctgtctgtccatctatccatccatctttttgttgaatgtcaaagtacattgcagtgggccaggcatggtggctcacacctgtaataccagcactttgagaggcgaaggtgggaggattgcttgagcccagggattcaggagcagcctgagtaacatggcaaaaccctgtctctaccaaaaaaaatacaaaaattagctgggtgtggtggcgccatgcctgtagtcccatctactcgggaggctgaggtgggaggatcacttgagtctgggaggtggaggttgcagagagccatgatcatggcactgcacttcagaaccagaccctgtccccctccaaaaaaaaaaaaaaagtacatcgctgatatcagtatacttcccactaagcacttcaagcgtatcattaactagagttcagtatttatttaaggtttctcttttttagctaaaatttacatataatgcaatgtacagcaattaattattccagtcggtgagctttgagaagtggtctgcagctcagccccatgtgggttgcaggtcatctggagtgaccatggaagtcatttagcaggagtttaagaggcgagggccaaggacttgcaggccaggataaaggggcctggagggagggcagcagaagccaggaggggaagctgggcatgaaccaaagggtcctggggattttaaggagaagttgaggctagtccaagggtccagcctctcctggagagggttactggtgactaagaggagtgtgtatggggagggtgcaggggagttggccagtcatggatggggtgtgttacagggtacaccagatcatcctgggtcgggaggggggctgtccagagcagtgtgggaggagttaagagatattgagggcagagagacagatgtgtccagggatcagcaaggggacggatcctctccctttcgtggagatccaagccagtgaggtcttctagccccaggtgcgattaggttcagcctccactccccagatcctgacctcagatgttgggcaggttcccaagaccttcctcagggctctgatagattggcacaggcctcccctggctggtccagctctggatcagtgtgaccctgcccactgggaccctgtggtacctgcttcctaagcctgaggtcagctagctgacagtaaggtgctagatggggcaggcaacatgtctattgctgtaccagggtgagtatccaggctaggcctgactccctccctctcagctgccaccttagctgcccttctgcacatcggcctgtccttgttgtccagggggcatgggaaggtatgttcctcctgatgagacctggccagtgactcatagcccagaaaggcatatagtcacactggccagtggggccctcccaggaacctctagatttggcacctgcagggagggctcctttatgagctgtttctgtgatgtttcaacttgtaccaaaatggaaagcataaatgcggcatcaggcgtgatgtcagtgctgagtgatctgaaacactgaatgcctgctctccctggtagggctggggctctccacaggaagaaggctgagtgacgtctgcaaccttccttttccttgctgctgggggggtgagaggaggcgagtgggaagagaacatgtgacttcggggggctctcagagcttcctgacagccatggaggtgaccgtgaggtagactccaccctgtgagcatcctttggggccagatatggcaagcaaggctgagtcccacccttgagggctgagacactctgtgcagccagtgttcctgcagggaagatgtagaagctcttcccagaactgccctccttgctccagagcccagtggaggaattaccagggagtgaccattgcagacagatcacagctgctcattcaacttagagttcatacagcctccagcttgggccccaagcctctggatccttggccagtgccaccttagctgcccttctgcacactgaatagtttgagtaaggaagcagctaaaaaagactcttctcagggagaaagtcctctcagagctacagagcccacagggtcctatgtttccaagtccctagcagacaggtggcagtggctccctgcaaagcctgtaggaaggcttcctgcagcttctgcttcccccacctcttaaaccacctcttgaccttgtactgcactgagccttcccatccttactgccacttaggcccccactgggtcggggtgcacgggcttccatggaggtccctaccagtccttggagatggcaagatgggcttccttgctagcaagaagagtcagctcattcaaagctaatgtctgacagagctgtccaccttagggtagccccaggaaggctcctgagacacgaggctcgtggctggtagcctgcacatctcctgcccatgtgccagatcaggatcttggaggtattagacagcagaaccctagctgaggcttcttgtcacactggtaaaaggatagtccctctgattctgatggagagccagcttggagagggcctaggagccacagggagccttctgggttcaacctcttgatgaggaggcatcactgtgtgcagctaaggaaggctctaactgtactggcactcaggccagtggagtctgccacagaactattcatgtatacccaggctgggtgggcgggtgggttggggtgcacagccatcatctctctccctaccccgtggacagcctccatccccctgagtgtggggataggggccttgcagtatggaggaagagactgaggttgggctcctcccaggaaactcctggggatctgtcggggaggcagagagggggatgtattgctggcctcagagagctccctcagccagtgtcctccttaggaggccttgcatgctgggcctgagcctgggaggggctgtggggagggtgcggtcaaggttccttaccgtctggaagaggctggatagaaatagctgcacccatctgggcgatgagtcactgaggggcgtttcagccttttcttggagaagttctattttaggtgagatgcctgtgccacagcctggatgacaggggctggggaaaggaaagttctggcggtgagtgcaggcggtttggcacgtgcctttgttcagcctgattcagaaccccagggacagtcaccccaaagttgcaggataagaagccttacctcctaaattccctttcccaggaagaagtctcacctcagggcatgctgcagtgcccaggtgaatgagagagatgggacgttgggtgtgggctgggcacccacgggaagaactgaatttgtggctgccaccctgggccagaggctgagcttcccctctgaggagtaatccccttccagggtccctctctggatgagtagaaatggcctgctctggggaactctcactttgatgggaataagcccctccctcccaagaatgacctttctaaagaggtctttagactgggttcagggactgaaattgttttctctctggctttctctacccaaacatagacaaagctgccttgcttctttctttctttttctttttttttttttttttgagacagagtctcgctctgttgcccaggctggagtgcagtggcatgatctcggctcactacaacctctgcctcccaggttcaagcgattctcctgtctcagcctcccaagtagctgggactacaggcatgtgccaccacacccggctaattttttctatttttagtagagacggggtttcaccatgttagccaggatggtctcgatctcctgacctcatgatccgcccgcctctgcctctcaaagtgctgggattacaggcgtgagccacggtgcacggcctgccttgcttcttaaaaagcatttgggtgggttaattgttcccagctagtgggatggcttctcacctcactgcctcggcatcactgttcttagagtttctagaactgggattggcctttggggggctctgccagggtttgcagtgctgacttctagagcctgacttggcctttggaagaggcaggactacagaaggcaccaggctccaggctgtccaggctgtggtttaggagctacgcagagctgtcagggctgatcttgccagcagcaacacttcctagccagggaaccattgagaacacattgctaaaacatctcagatcttggttttctctcctgtgaggacaaaatgagagaatgcctgtgaacatgccctatgtggtgcttggcacaagggggtgcttgccaaagtgcagtgttctccctcttcttggctgctgcccttgggttgctgggataaggcacctgagcccaggtcccccaactggcaagtcaacctgtagcagtagccctggggcctcaaggcagagagcagggctggagccacatgtgtgggtaaataaaaggggccttctgccccagagatgagacggcaccttcccctggtgatgactgggtggccaatagggtgcatttagaacctctggctgcaaccacagacagagaacaaccttggcctccagcctcagctctggttgatgaggaggagactcttcattgaggcaccaaatctcggggcttccaccttgttgagctatgacctgcatgaccaaattgccaggatgaatgaagcaagcccctctgggatgagccctgctctgtaccacatgttgtgtgcagccctgagaacaccctatcaacgagagctcatgggctgctttggggcacagaagacaccttgtaaacaacaaatcagtagacactttgggaaagaataagcactatggagaaaataagctgggtgatttgacacagagtacccggagggtgttttatttttatttatttatttaattattttgagatggagtctcactctgttgcccaggctggagtgcagcggcacagtcttggcttactgcaacctccgcctcctgggttcaagcaattctcctgcctcagcctcccaagtagctgagattacaggcgttcgccaccacacctggccaattcttactattttcagtagagatggggtttcaccatgttggtcaggcaggtctcgaactcctgacctcaaatgatcctcctgcctctgcctcccaaagtgcctggattacaggtgtgagccaccgcacctggccaaaggagagcattttagattgtgtggccagaggaggtcctggtgggaaagtgttacctcatctgaaatctgtacaacaagctgggccagggggcagagggaataaggagtacaaaggccctggtacagaaatgagctcaggggaccacttggcagagcagacagcctagagtgtctgcagtgaaacagccaaggggagatggcaggaaaagagaccagagagagggggaggctggggtggggctgggttgggtcacagagttgtgctgaagagttcccaaggtgtggtggaaatccacttagagtgtttgatcctattggtgagatgctctgatttacatgtgggtttttggagaaaaattattgggtcatgtaactggaagtccaagggtagacttggggcatagccagatccagggaatggaatgaagtcatcagatctactcctttctcctttcgttgactcctaccatctatggacatcattcttagcatctctctgtatgttgggaaagaagactactgctgctgcaaagctacatccttctgattagtaatccaaaggaaaacgaataaagaccctctctcctgttgttcattaccagataacgtggagggctctaaccgactctgtttgccaggtcacgtgcccatccctgcacagggctaatggcagagggaaactatgtgtttatcacatggatagcggcacatgtctcgtttgctctggaggcatgaattatcccacttctttaaaaagctatcttccttaagggaaaaaaaaaggctttaaaaaattctacttaacatcagtcacttacattgcattactttaccctcacttattttgttctcaagatttttcattctgtagtatcttgtttcttcagctagactctaagcttcttcaggataggaatcatggtttctttttattctctatgcctccttctcccacgtattactcttcacttatttattcattatgtgagtttttactgaatacccattgcatataagcactgctctagggccatgcctttcctcttgggttaggttttaaaagatcagtctggctgctatgtgcaaatggcctgaagtgggaagcaggggaaggctactgggttcatccgagcgggaggttggggtgcacagatctgaggcactgccagggggtggcggggaggactctcaagcaggagggtctggcaggcagtgagttggtggttggggtggggtgggggatgggactgcctccactgcctcacatgcctggcaactcctagagggcaggggagtgccatctgtccttcagccctgccacctggcagcccagaaatgcctgagcagggcttggtgctcctgcctgtgctaggagtggccttggctgctgtggggcctgcactgacctgggccatgagtactgccaatcctggccaccctgctgactattttgcttttctcctcaggtgaaggagtggctctgtctgaactgtcagatgcagagggctctgggaatggacatgaccactgcacctcgctccaagagccagcagcagctgcactccccagccctgtctcctgcccactccccggccaaacagcccctggggaagccagaccaagagagatctcggggcccaggaggaccacagcctgggtcccgccaggctgagacagccagggccacctcagtgccggggcctgcccaagcagctgcccctccagaggtggggagggtgtctcctcagccccctcaacccaccaagccttccacagctgagcccaggccacctgcaggagaggccccggccaaaagtgccaccgcagtgcccgctgggcttggtgccactgagcagacccaggagggcctcactggtaagctcttcggccttggcgcgtcactgctaacccaggcgagcaccctcatgtctgtgcagcccgaggctgacacccagggccagcctgcccccagcaaggggacacctaagatcgtcttcaatgatgccagcaaggaggctggcccaaaacccttgggctcagggcccgggcctgggccagcacctggagccaaaactgagcctggggctagaatgggtcctggatctggacctggagccctgccgaaaactgggggaacaaccagtccaaagcatggcagagcagaacatcaggcagcatcgaaggctgctgccaagccaaagaccatgccgaaggaaagggccatctgcccactgtgccaagccgagctcaacgtgggcagcaagagcccagccaactataacacatgcaccacctgcaggctccaggtgtgcaacctgtgtggcttcaacccaacaccccacctggtggaggtaagagctggaccaagcatgctcccttgaaccttgatgagaggccgggcctgggtagtgagtgtcatgggaaccagaaagagttctgggtctgcagcagccatggggctgctcctgtacaactaatgctgcagaggggctgcattccctttcctgtccctacctcaggccccagttctactcagaactaactttcactcagagttgggggtaatggtgcctactgactcagactagtgccctaaggctgatcccagagtccctgagctggcctccccatttccagctaccatgggcatggccctgatgaaagacaccaacctcccctgctcagataggagaacctgaggtcccacactgccatggacctgtgaccttcagaggggtagggatcgaatggccatgatgcagagggttgcgtcccacatccagggtggggtgggaggctttctcacaatggggcagggcatgtcccactgtccaggctccagcccagcaaggtggtattcaaccttgattgtctcttctgaggtcataagtgttgacgtctacttgtcaaagtcacagcctttggtccacatgttttacccaggctggggctgggctctccttagagctgctactggggatgctcagagatgcttctctttcccacaggaaggtttgagacagacctggggttgtggccattctctccgcagcccctgctccagggaagggcactgagcactgtgcagtgctaggcaggagggagcaggaggcccagtgtaaggttcagtgttccctcgaagcctggagtccagcccaagaggctcagaaggtgaaggtgccctggcagaattagaccagcctgggccaggagcagatgctgcttctgctcctccctcagtcctgtggcccactctccctggcccagggtcacccatgtgacccttaccatgctgccttgggcgtagcttggtgtgtctccttagagtgccctcagtcttgatagatgaatgtgtttcccagctgtgtcacgttaggagatgttcgagccaaggccctgcctcttgcacatggggagccacctgagccctctggtctcttgggctgagccatttgtagctgatggtggcgcaggggtgtgcggagtgcaaaccaccactggcccaggatgggacaagagaggagagcatgatgttgccatggcctctgtggcaccttgttctgacttcccttgggccaggactccacaggagtccccgtgggaccccagcatgactaggaagactactttggccaccaaaggccacactttccaatatgcagggaagggcagccctgagcaagacaactgacctcctcatgtggcacccatctggtcttctaggcaccacgaagccaactctccaagctctagatctggtggctcactggcgacagtttgcctcactggctcggggaaaggggtgcaccagggtgtcaccacaagactaggagaaccctagctggctgctctgcccagagacctccaggcacaagctcactgctggtcaggtggggcacactgacactgagcgactgtgagccccagtggacttctgagttggcctggcctggaggactcctgtccccaagagacctcccagcccacatttccttattaagcagaatgtgcacgaatgggaggggaaaactgtctctgtccaggagcataaatgttcctgacagttcctcttggccgtccctgggccaggccacgggaagtgctgattctgcccaaacagaagagtttcgttcacacgctgactagatgaaacgtctggattctggcctaggcctctcattagctgcttggttctggctatcctggaccctggagcttctgtctcttgatggccggtgttccccccatcacacctctctcaatttcctgctgtctccatgtcctgccccactgccccctccttagccaggaccactctcatctccatagggtctgatgggtcccatgggcctgaaagaaagctgggggatgtcctggtcctagtcctggtcctacctcatccccagctcaggctgctcctgacagcagtcaggggtgatgaagtctctctaactcctttctcatagctctccctatcaatgctgctgtccccagagggcctgcagctattctagggaaggtgtggataggcggccataatgcctctcccatgattcccaccatagagactgtaccaccatccaccaccagagatgcaagccagcagcccggggtcatcctcacctcctcctctttaacctctgcacctgctccatggaccaagccctgccagctctgcctccccactgtcacaagaatctggcctctctcccacccatgctcacagccttagtccttccgtccttatcctcccttacccacacaatgaccaaaacctctgtgcagcttcacctgccttgggtcttgcaaggggctggtgctgatatgttcaccatcccttcagcattgcttttcttcactgaggcccctaaccaggctgtggtctgtcttggatctcacctcagtcaatggccacttggcatcctgagcaattttgtgcttctctgtgacctacttggtgtgttcttggttagaggtttctgatttctcagcacttgccagagacacttaccctgccttgggagtgtggtggtaaggccagcaggtccttctccaggtcctaagggtgggtctgccatggctgtctctctctggaccttgcctgcttaagaacgactgtgctgtgtctttgtgcacaaagaagggacagacccgtggagcccccctcatagctcccacagccctgttagacctcctgggactccacctgaggccacagtcaaccatctgggccagtgggttgggaattttccccataggttggaaattttcctgaacatttctgagctgtaaaaatctttcttctttctagattgggagttcagagcacacaatagaggagagagtagaattggatcctttttccttttgaactttcctctgaaaaaaaataaccatagtgctatttagtgagtcatttcataattaagagttgttgattccagttttttttacctatttgtcttttggaaggataatagtactctctggcttaatttttaattgacgttcagttcaaaatagagtttgtgaagaaattagttgaattggaattgtgacagtaacattaccagtctcttattatatcatcattgccaaaattccagctgtgcccttgagaagtcgggcctccctgggcaaagtcccttgcacctgtgatacatggggctgggcttgctcattggggtaggggttgcagcaggggcatcaggccagaggtcctgttgcctcccatgtagaatagggaccacaatactcccttttaggtttccgtgagaaccaggtgagatgctgtacctcagatgcttatgcaaggcctgacacagtcagcccttaagccaggattttggaacaggagtatcctaaaagagggtctctgtgtgagaaaggaagcgtccccatgagcccctatctgggtgtggatggaccctgtggctggtgtaagcttttggtatgagggatgccccacagggaacaaacacatttggtgctggggggtgagggggttacagcccagctacaaggatacacactggggacaccatggtgggtttattttatgggaggaagaggcccagaaagaaggagcttaggcatgtccagcaacagggaggctcagggtcgcagagtcaggagaggaatagcagcaccagtgatggccatccctgtggtccagtgtcctccaagatgacccctgggcatccttttctctggagttctcattcacagccccctggtctggcagcagggctgagggtgtttagggccaggcagctggccatagggcattgactggaacggtgtcaccataaccatactggcatgcaggccagctccacacatgaagagattacgtggaatgtaggttcattcagatgatggcagacagtgcaggatctgtcctggctcacaaggcacaatggccagtggtcccagaaggcagcagctctcacgtgcctagagggcaccccactaactcagtcatcccgtttccccttctttaccctaaatagtgatgccctgaaccactgagtgccatctgatggcatacacacctgcctctcccactgttagttgatgattgtccttggggaatttgtatcttcctgccctagaaaggaactggacagagggaatgaggcagaagtagtcatcagagccaccccattatccatcccctgcccttttgtcaaagaggccaggcgaaggggtaagcaggcagcactttcccaaggactggagctggcatgggctgagtgaggcagagtacgagagggctgtgcaatgaatggatggctgaatgaggaatgaacactgaaattgcggaatggaaacgagcggaagaataagggaatgaatgattgggatggaggtaggggtatgttggggttggagaaaatgagaatagaatgaataaaggaattgggaccccagctgtcccagcccccaggcacagagattctacatggcctgccttccacccgattctcattccccagaagacttgggcctgggccaggtctcccctggctctactcctaccagccccagtgccctgtacccttcttccccactcccagagggcttgtgaagggcctccagcagccaggtcaatgtttatttttagcccttacttcacacgcctcttcctgcctgctctcccttcctcactgcctactatagcagagccaggagcaagagggcctgccaggcaacctgcaacctggctgtctccatgaataaatgtgtgaaggagcaaagcaccagggagcatgtgaccacaggtaacatctctgctgagagctgggcctctgggctcaggcaagctggcctctccagcatttggtcagagcacttagcattaggtctgcttcctccatccagactacccttccaaggtgacttgcttcatttagactgttgcttctgtgtggggttcgcaggccagagatggggttaggagtttgccaggccaccaaggtgggccagggcagatatccaaactttgagaggcctaacatgggatgggtgtgcacagggctccaaagtggagttagggcagcattgccttgggccagcccactgggcctagatcctaaacccatcatgctgaccatagggctggggaaggggctgtttgatcatttccagagctctctctcttgatctctgcctatagccctgccatctctccagggtcattttgccatctcacagtcctttctgacatgggggaatttccattgtgtacacaggtgatgctgggggcatgtgagctagggttcctggatcaggctctgtgctctcccatgtcctgttcatctggggctcggtctcaacctatctgtattttccccaggcacctctgggggtgcaccctgccaggccaagtgagcccagggcctggccagtggccagcacttactgccttgtggggttttgtgtggagacacattgagcatcagataaggttcaagggagtcagtagtggtgttagggctgggctgtgcagagaacagagtgagtatatgtatgtagggcatctaaagggtccccctccacagctgggccactgccccattcctctgcctgggacttgtgcatgaggttgggcctcggggaagagcagaagctccagtgggagagaagcagtctcgaccctgagtaaccagcctggggagcaggcctgtccctcaacacacaccaaggccctgccacctgcccagcctagcctctgctgaagcccagagcagagaagtggagtgtagctctctgtggacagcaaaccagggcagaatcattgacatgttatctgccatggtggccctaggatgccaggctaagggcaggcaccctgggggtaccaggcttccaaggctgccagaggcagcatgtgaagtgagggtactgaggttgtcagccttcctgggggtggcaagggccaaaggtcacctccttttccagtcctctggctctgtgaccttgtggttcttatggtccacctcggtggcagagttgctggtgggagcctgtatgtccaggcacctgggatgagtgagttccctgcaggacggatggagcactaaggctctgcgccacagagtaagaacaggcacaggtgtctgtgggaccctgctctgggctccactgtaactctcattctccatcccatgtgggccagagaaggacttcaaatcctgccaaggaggagccctgactctggaggaggctactgggagacatgcccctgtcagcctcagacctgctgcaggaatcacccatttaggcctcagagatgcccaaaccctatgcctgtacaaagcagctggggctgggagacatggacttcgcttcttgtgttctgggggcttcaccattgatacctgtgtcatacttgtaaatgacctgtttggggttgtgggctccagaaaggctgcatgccagtgcctgtctgtctgctgagtcatggctgtcttcagcccccagcactgggcctgaaacagtagaggatcctgagagtggtggactgatggttgagaatttgatcccagtccagctctggaaggagcagggcccctgacacaagggccaccacacatagtccccatcagaggaacagtccagagccctgggggcaggaggaggcctctacctgagggtctctgctggccttagacaaggtgacttgggctggggatttgagcagggaggactgctcagcccctctgtcctccaccaagcagggttactcccagacagcctcccctggccccaggagtctgcaccctatctagcatagcccttacctgggaaagagtgtggggaaggatggagtcagacctgagagctgggaggcaggggaagcatagtgcctccaggaagtgctccatgcttggatgccactcctcttccacaagggttctcaactgctggactccataccagcccactaggagccgtttgctccctcagattgagacctcagcttcccctgtgcttagggctaggccctcccatcccccacagttctcccccttttctggccgggtgaaaagttctctgtgggttaaggaaagtactcttctttggggttgttacttgcattctgactttgtgtgtgttcatcttaaaggtaggggaatttgttatttgggggcagtaaattggtcagtctttttctccttatgtctttggtgttatgctttgaaagttctctcctccctaaggttacagaaatagttatggaaatattatttgaggacttcagtgtctttttaattttcatcaaccccctctcccatttccttgcagaaaacagagtggctctgtctgaactgccaaaccaagcggctactggagggcagcctaggagagccgacccccctgccgccgcccacctcacagcagccccctgtaggggcccctcaccgtgcatctggaacatcccctctgaagcagaaagggccacaggggctgggccagccttcaggccccctgcctgccaaggccagccctctatccaccaaggccagccctctgcccagcaaggccagcccccaggccaagcccctcagggcttctgaacccagcaagaccccaagcagtgtccaggaaaagaagacccgagtccccactaaagctgagcccatgccgaagccacctccagagactaccccaacccctgcgactcctaaagtaaagagtggggtgaggagggctgaacctgccacccctgtcgtcaaggctgttccagaagcccccaagggtggggaggcggaggtcagtcccattcacttcccagagaccctagctttcagacaggacagtctatggaaaggcttgcctccctgggtggctgaggctgtaggctcaggacaggtgccttggggccacacaggagggaagggacacagtagaaggaaagtctagatgaggttctggcacgcttggagactgtgggttttacactggtgctgtgtctggcaccttgtcagatgctttgctgggttttgataccctttgatctagtaaagtttctctttgaagaccaagggctggtttgggcttgccatggaaccttcaggttattcaaggccagaaggagatagggtgggtggcgggccctaaacccttgggaaatggacagactcttccccagggtcctgggattgacagggaggattgggttcccaccacgagctttgccatggggagtcagtgtctgcttttcaccctgctgcaggacctggtgggcaagccttactctcaggatgcgtctcggagcccacagagcctcagtgacacaggctattcctctgacggcatctctagctcccagagtgagatcacaggagtcgtgcagcaggaggtggaacagctggacagtgcaggggtgacagggccacatccacccagcccctccgagatccacaaggtggggagcagcatgcggcctttgctgcaggcccagggcctggccccaagtgagcggagcaagccactctccagcggtactggcgaggagcagaagcagcggccccactccttgtccatcacgcctgaggcctttgactctgatgaggagctggaggatatcctggaggaagacgaagactctgctgagtggaggcgccggagagagcagcaggacactgccgagtcctcagacgactttggcagccaattgaggcacgactatgtggaggacagcagtgagggtggcctgtcccctcttccaccccagcccccagcccgggcagcagaactgactgatgaggatttcatgcgacggcagattctcgagatgagcgccgaggaagacaacctggaggaggatgacactgccacctccgggcgtggcctggccaaacatggcacccagaaaggtggccccagacccaggcctgagcctagccaagaaccagcagcactgcccaagaggcgcctgccccacaatgccaccacgggctatgaggagctgctccctgagggaggctcagcagaggctaccgatggcagtgggaccctgcagggtgggctccgtcgcttcaagaccattgagctcaacagcacgggaagttatggtcatgagttggacctgggccaaggcccagaccccagtctggaccgggagcctgagctggagatggagagcctaacgggctcccctgaggaccgctcccgtggtgagcactcctctacattgcctgcctccacacccagctacacctcgggcacctctcccacctctctgtcctccctagaggaggacagtgacagcagccccagccgcaggcagcgtctagaagaagcaaagcagcagcgcaaggcccggcaccgctcccacgggcccctgctacccaccatcgaggactcctcagaggaggaggagctgcgggaggaagaggagctgcttcgtgagcaagagaagatgcgggaggtggagcagcagcgcatccgcagcacggcccgcaagacccggcgggacaaggaagaactgcgggcccagcggaggcgagagcgctccaagacaccacccagtaacttgtcacccatcgaggatgcctccccgacggaggagctgaggcaggcggccgagatggaggagctacaccgctcctcctgctctgagtactcaccctcaccctcccttgactctgaggctgaggccttggatggtggccctagccggctttacaagtcaggcagtgagtacaacctgcccaccttcatgtccctctactcaccaaccgagacaccctccggcagctccaccactcccagttccggacggccgctcaagagcgctgaggaggcttatgaggagatgatgcgcaaagctgagctgctccagaggcagcaaggccaggcagcaggggcccggggaccccatggcggcccctctcagcccacaggcccccggggcctgggctccttcgaatatcaagacactacagaccgtgagtatggccaggctgctcagcctgccgcagagggcacgccagccagcctgggagcagccgtgtacgaagaaatccttcagacatcacagagcatagtccgcatgcggcaggcctcctcacgagacctggcttttgctgaggacaaaaagaaggagaagcagtttctaaatgctgagagtgcatacatggacccaatgaagcaaaatggtggcccccttacccctggtaccagtcccacccagctcgctgcccctgtgtccttctctacccccacctcctcagacagcagcgggggccgagttattcccgatgtccgtgtcactcagcattttgcaaaggagactcaggaccccctcaagctgcacagctctcctgcctcccccagctcagcctccaaggagataggcatgcccttttcccagggccctgggaccccagccaccacagctgtggctccttgtccagctgggctgccacgaggatatatgactccagcctccccagcaggctccgagcgtagtccttcaccatcttccacagcccacagctatggacacagcccaaccactgcaaactatgggtcccaaactgaggatctaccccaggcccccagtggccttgctgcagctggacgagctgctagagagaagcccttgagtgcgagtgacggtgagggtggcactcctcagccttcccgggcatattcctactttgcaagctccagcccacctctctccccgtcttccccctcagagagtcccacattctcccctggcaagatgggcccaagggccacagcagagttctctacacagacgccaagtccagcccctgcctcagacatgccacggagccctggtgcccccactccatcacctatggtagcccagggtacacaaacaccacatcgacccagcacgcctcgcctggtgtggcaggagtcctctcaagaggctccctttatggtcatcacgctggcatctgacgcctccagccagaccaggatggtacatgccagtgcctccacctccccgctctgctcacctactgaaacccagcccaccacccatggctacagccagacaacacctccgagtgtgtctcagctgcccccagagccacctgggccacctggctttccacgggtgcccagtgctggtgcagatgggcccctggcactatatggctggggtgccctccctgctgagaacatctccctgtgccggatctcctctgtccctgggacgtctagggttgagccaggccccaggacccctggcactgcagtggtagacctccgtacagctgtcaagcccactcccatcatcctcactgaccagggcatggacctcacctctcttgctgtggaagcgaggaagtatggtcttgccctggatccaatcccaggacggcagtcgaccgccgtgcagcccttggttatcaacctcaatgcccaggagcataccttccttgctactgccaccaccgtgagcatcaccatggcctcgtctgtgttcatggctcaacaaaagcagcctgtggtctatggagacccctaccagagccgccttgactttggccagggtgggggtagccctgtgtgcctggcccaggtcaaacaagtagagcaggctgtccagacagccccataccgaagtgggccccggggaagacccagggaggccaagtttgccagatataacctacccaaccaagtagctcctctggccagaagagacgttttgatcactcagatgggcaccgcccagagcattggcctcaagccaggcccagtgccagagccaggtgccgagccccaccgggccacccctgcagagctgcggtcacatgctctgccaggtgccaggaagccacacacagtggtggtgcagatgggagagggcacagcaggcactgtgaccacactgctcccagaggagcctgcgggtgccctggaccttaccgggatgaggcctgagagccagctggcatgctgtgacatggtctacaagctcccctttggcagcagctgcactggcaccttccacccggcccccagtgtgcctgagaagagcatggcagatgctgccccacctggccaaagcagcagccccttctatggtccccgggaccctgagcctcctgagcccccaacctaccgggcacagggggtggtggggcctgggccccatgaggagcagaggccctacccacaaggcctgcctggtaggctgtactcctccatgtctgacaccaatttggctgaggctggcctcaactaccatgcccagaggatcgggcagctcttccagggtcctggacgagactcggctatggacctcagctcactgaagcactcctacagcctgggctttgcggatggacgctacctagggcagggcttgcagtatggctcagtcacggacctgcgtcatcctacagaccttttggctcacccgcttcccatgcggcgctatagctcagtgtcgaacatctactcagaccacaggtacggcccacggggagatgcagttggcttccaggaggccagcctggcccagtacagtgccaccacagcccgtgaaatcagtcgcatgtgcgctgccctcaactccatggaccagtatggtgggcggcatggcagtggtggtggtggccctgaccttgtgcagtaccagccccagcacgggcccgggctcagtgctccacagagtctggttcccctcagacctggactccttggtaaccccacctttccagagggccacccaagtcctgggaacttggcccagtatgggcctgcagcaggccaaggaacagcagtcagacagctgctgccgtccacagccactgtacgtgcagctgatggcatgatctactcgactatcaataccccaattgctgcaacactgcccatcaccacccagcctgcctcagtcctgcggcccatggtgcgtggtggcatgtacaggccttacgcatctggtggaatcacagccgtgccactcaccagtctgacacgtgtgcccatgattgccccccgggtacctcttggacccacagggctgtaccgctatcctgcaccaagtagatttcccattgcttccagtgttccacctgcagaagggcctgtctatctggggaaacctgctgctgccaaggcccctggggctgggggcccttcaaggccagagatgccagtaggggctgcacgggaagagcctcttcccacaaccacccctgctgccatcaaggaggctgcaggagccccagctcctgccccactagctggccagaagccaccagcagatgctgctcctgggggtggcagtggggccctcagccggccagggttcgagaaagaggaagcatcacaggaggagaggcagcggaagcaacaggagcagctgctccagctagagcgggagcgggtggagttggagaagctgcgacaacttcggctgcaagaggagctagagcgggaacgtgtggagctgcagaggcaccgtgaggaggagcagctgctggtgcagcgggagttgcaggagctgcagaccatcaagcaccatgtgctgcagcagcagcaagaggaacgccaggctcaatttgcactgcagcgggaacagctagcgcagcagcgtctgcagctggagcagatccagcagctgcagcagcagctgcagcagcagctagaggagcagaagcagcggcagaaggctccctttcctgcagcctgtgaggcacctggccgagggcctcccctagcggctgctgagttggcccagaatggccagtattggcccccccttacacatgcagccttcattgccatggcagggcctgaaggacttgggcagcctcgtgagcctgtgctgcaccggggtctccccagctctgcctcagacatgtcactgcaaacggaggagcagtgggaggccagccgtagtggcatcaagaagcggcactccatgccacgcctgcgggatgcctgtgagctagagtctgggactgagccctgtgtggtcaggaggattgccgacagcagcgtgcagacagacgatgaggatggggagagccgctacctcttgagtcggcgacgccgggcacggcggagtgctgactgcagtgtgcagacggacgacgaagacagtgctgagtgggagcagccagtgcgccgccgcaggtctcgtcttccccgccactcagactcaggctctgacagcaagcacgatgccactgcctcatcatccagtgctgctgccactgtgagggccatgagcagcgtgggcatccagaccatcagtgactgctccgtgcagacggagcctgaccagctgcccagggtctctccagccatccacatcacagctgccaccgatcccaaggtggagatcgtcaggtacatatcggcgccagagaagactgggcgtggggagagcctggcctgccagacggagccagatgggcaggcccagggtgtagccgggccgcagcttgtagggccaactgccatcagcccctacctgcctggcatccagatcgtcaccccagggcctctgggcagatttgaaaaaaagaagccagatcccctggagattgggtaccaggcccacctgcctccggagtctctctcacagcttgtgagccgccagcctcccaagtcccctcaggtcctctactcaccagtctcacccctgtcccctcaccggctcctggacacctcctttgcttccagtgagaggctgaacaaagctcacgtgagtccccagaagcacttcacggctgacagcgctctccgccagcagacgctgcctcgccccatgaagaccctgcagcggtccctgtctgaccctaagcccctcagccccaccgccgaagagtctgccaaagagagattctccctctaccagcaccaggggggactgggtagccaggtatgggaacaggggctgttccagggtgggacaggggtctctgcctagcccgaggggcccccacagggaggggcttcttctggggtgggagtagaggcatctctggccccagaggcccaggggaaagagtcaatgagcagatgctccctggtgcacatctgaaagagcctgcagcccggcagacagcctggcagatacagacacacacatgggcccccacagccttccagccacataccctactagaagcttcagcctcctcccagcactgtcccttcaccacccacacctggtccagcccctgctacctccccctttaggcctcttcagctctcacttctagtctggaccccttccactccaaacttaatctatgggtgtttcctaagaaaatcagtcatatgaacctggcgcggctgctctcgtcctctcagtcctggcctggtttccattgccacacaggaagcccacacccctatggcctagcactagaggcccatcccagcgggctgcagtgtgctctctgccccagggtgttctctgcccctacctggccctcggtaaatctgtttacacatctgtctgctcccctagataggggattcagaagcataagcttacccttggttgtggctttatttgccagtgatggatggggactgtgagaagtggcttggctgtgggctgcagccaaagtgagaatagagggttgtgagggcctaatgccaacaactgagtgccaggctgaggaggatgggcttttcctaaagaccctggaagcctctggaggttttaggcatgtgagatgggacaaagcagatgttttggaaagtttcctgggcagaatgtgggagggtgggctgaaggaagagacctggcagaggaggcaggagccagaggcatcgtaaggtagatttgcccattttcagggtgtgacacagagacgagaaaagtggagccttagaatggggtttgtggaggtgataatcttgggtagtgaagtgttggtgtatgcaggccatataggggtgtgggtgggatcaggactctaggctggcagggagggcaggtcagagaggcagggtggtcctggctgcaggcacagaggtcccatgggctggccatgtgagaccaggccatgataggcactcatgatgcgtggccaaaataagaaaagagacaacagagtgaggggttcaaaaggctaaatttattccataaaaggcccaccctgaaattttgagggcacactataatttttattatgacatatggtggatgtaggtgggaggtttttaggtagttacttggcaaggtaaaaagtaagaatcctataggagtcacttcccagtatatattggaatttgggtggtccatgaaacccaagggcatggggcattctgggaaggctaggagcgagagaaaaagggagaagacagagtgaactaccaggcaatgtggaccttcaggcaatgcagagtgtctagggtaggcaaggaggaccccatggtaggcactgttagggaaccttgaccaggaagccatgctgctggaggtagggctggataggacttacgggtgcactggtggctccagagaacagcaggttgaccgagggacatggagggagctggggaccaggccaagagcacagcccagagggtttggcagagggcagtgcagggcactagaggaagagggtgggcaggcagctgaggagccttccactttagagaggactagggcaggatgcagaatgactcagagcctgccacgattggcatacaatctacatgtgtcccttcccatgatcctctagggagcctggcgggcccaggaccctctccactccatgcctcctgttcatactccactgatctcaacccctgtcagctgctaggccccaaacccagagccacagctgtactcttcttacctcaatgtgaggcagagggtggcaggcccattggagatgtgcaggggttctcaaagccatgtgctgggccagtacaggacattggcatgaagggaatctgcccgtaccctcctgcttcccaaagctctgggaaagagaagggctgtaaaataatcacagatcttccctctatggcaaagaaaccaaggcctatgggtgggcagggtaggcctccaggctgcctggtaaatcagggcaccagcaagatggaacccagctccttccccagcccaggcctgggttctgccaccccacaccccatcaagtcaccacaccttgggtctcagtgctgcccacccttccctctgtctcaggtgtcggcgttgccacccaacagcctggtccgcaaggtgaagcggacactgcccagcccccctccagaggaggctcaccttcccctggctggccaggcctccccacagctgtatgcagccagcctgctgcagcgagggctgacggggcccaccactgtccctgctaccaaggccagcctgctccgggagctggaccgggacctgcggctggtggagcatgagtccaccaaactgcgcaagaagcaggcagagctggatgaggaggagaaggagattgacgccaagctcaagtacctggagttgggtatcacacaacgcaaagagtctttggccaaagaccggggtggccgtgactacccacccttgcgtggtcttggcgagcatcgtgactacctatcggacagtgagctcaaccagctgcggctccagggctgcaccactcccgctggccagtttgtggacttccctgccactgccgctgctcctgccaccccctctggtcccactgccttccagcagccccgcttccagcctccagccccacagtattctgcaggcagtggtgggccaactcagaacggattcccagcccaccaggcccccacctaccctggccccagcacgtacccagctcctgcctttcctcctggtgccagttacccagctgagcctggcctgccaaaccagcaggctttccgccccacaggccactatgcaggccaaacacccatgccaaccacacagagcaccctttttccagtccccgctgatagccgtgccccactgcagaagccacgccagacatcgctagccgacttggagcagaaggtgcccaccaactatgaggtgatcgccagccccgttgtgcccatgtcttcagccccatctgaaaccagctacagtggcccagcagtgagcagcggctatgagcagggcaaggtccctgaggtgccccgggctggtgaccgtggcagtgtgagccagagcccagcccccacctacccctctgactcacactataccagtctggagcagaacgttcctcgaaactacgtaatgattgatgacatcagtgaactgaccaaggacagcacctctactgctcctgatagccaacggctggagcccctggggccaggcagcagtgggcgtccagggaaggagcctggagaaccaggtgtccttgacgggcccacactgccctgctgctatgccagaggagaagaggaatctgaggaggactcatacgatccccgcgggaagggtggccacctccggagcatggagagcaatggtcgaccagccagtacccactactatggtgacagtgactacaggcatggggctcgagtagagaagtatggtccagggcccatggggcccaagcatccctccaagagcctggctccagctgccatctcctcaaagcgcagcaagcaccggaagcagggcatggagcaaaagatatccaagttctcgcctattgaagaggccaaagacgtagagtcagacctggcgtcctaccccccacctgcagtcagcagcagcctggtctctcggggcaggaagttccaggatgaaatcacctatgggctcaagaagaacgtgtatgagcagcaaaaatactatgggatgtccagccgggacgcagtggaggacgaccgcatttatggcgggagcagccggtcccgggcaccttctgcatacagtggggagaagctgtccagccacgacttcagtggctggggcaaggggtacgaaagggaacgggaggctgtggagcgacttcaaaaagcgggccccaagccctcatccctaagtatggcccacagccgggtacgaccccccatgcggagccaggcctctgaagaggagagccccgtcagtcctttggggaggccccgccctgccggagggcccctccctcccggcggggatacctgcccacagttctgctccagccactccatgcctgatgtccaggaacatgtcaaggacggacctcgggcccacgcatataagcgtgaggagggctacatcctggatgattcccattgcgtggtttccgacagcgaaggtaatggcagccaggggtgatttctgcggatactcagcagctggggggcctgcctacctgtggggccctgggccctaagatgtcccagcagggtctggtctggcgcctcatctggtgggccctgctgcaggcaggctgcccttgcctgctccatctgtgccctggtccgtggttgcgggagggtgggctgggggcctgctgatctgcttgtggctgtggcacccactctcttggtttctttgcatggcttcagctaggcctccccctgcggctagcccgggggttgatggtattctgtttttggtctctgaagcgtatcacctgggccaggaggagacggactggtttgataagccccgggatgcccgctctgaccggttcaggcaccacgggggccatgcagtttcctcctcctcccagaagcgaggccctgccaggcacagctaccatgactacgatgaaccccctgaggagggcctgtggcctcatgatgagggtggcccaggccgccatgcctcagccaaggaacaccggcacggtgaccacgggcggcactcaggccgccacactggtgaggagccgggacggcgtgctgccaaaccacacgctcgggacctgggtcgccatgaggcccggccccactctcagcccagctctgctccagctatgccgaagaagggtcagcctgggtatcccagctctgctgagtactcacagccatcccgtgcttcatccgcataccatcatgcctctgacagcaagaagggctcccggcaagcccactccgggcccgctgcactgcagtcaaaggcagaaccccaggcgcagccgcagctgcaaggtcggcaggcagctccaggaccacagcagtcacagtcaccatcatccaggcaaataccctctggggcagcatcacgccagccacagacacagcagcagcagcaaggtcttgggctgcagcccccacagcaggctctgacacaggctcggctgcagcaacagagccagccaaccacccggggctcagcccctgctgccagccagcctgcagggaagcctcagccaggccccagcacagccacaggtcctcaaccagcaggaccggtaagcagagctcccatgcatgggttgtaaccagggaagatgctatgaatgaagcttggacatccccttggttccaggctgggcatgggcagaatcttagctataggttctgtgttgcagccacgggcagaacagacaaatggctctaaagggacagccaaagcaccgcaacaggggagggctcctcaggcccagccaacaccaggacctggacctgcaggtgagcctatcctttgacacccttggctgtggcccagagcacccaggctgttctctctctataccacctgtgccctgagctcccccacactgcatgccctcactaatccctgagaaggtgccccaggggctgtagacctccccagcagaaaacaagcctggggttagaataagccaatgaggtcaccagcacaggggctttagggcccaagcagctttgggcagagaagcaggaaggcactggtgagcacagggtggggaccatggcttcttgctccctccttccttcccctttcctgctcttctctgcctttttttccctttcttcttctttcccttcctcaacctccttttttctgccttctcccaccccttgtcttcctgttcttaccttcttctctttatttccctagcctccttctcaccttcccaccttatagggtacctgtgttcagattctctcgtgggtacttgccctcttagaccctaaagagccaggccgtgcatagctcattatggcgatttctttcctcctaggtgtgaaggctggagccaggcctggaggaaccccaggggctcccgccggccagccaggtgccgatggggagagcgtgttctccaagatcctccctggcggggcagccgagcaagctggcaaactgacggaaggtatgcactgcctgcaactggtctgtggtgggtggctactctggtacaggctgggtctgtgagatgattccagactcagtcacccaggcagaggccagccagagagcccacctgctgatgcccagttgttctccgggcaatctctgccccttgggctgagcttgccttcactatgccaagtggccctgactgggaggggtctggcccaatttcctgatggctctctcctctttctttgtcacagctgtctctgcttttggcaaaaaattttcctcattctggtgaccatgcccagcatggtgagtacaagcagcctgtaccttgcctcttctgggaaaggcccgaggcactgggggtgggggtggggctctaagtccgaaggggtcctctgggaggagtccagtcttcggctggttcagtacccagagctgcaatgttcccttctctgaatgtgggaggagaaaaaggagggacactgtgcacagagcccctaccatggggccaacacagtaggggtccccagcaaaggaggggccaaagccagggccagtgccctggctttcaaaccatctgccatcccctgcagggctctcacagcactgggctggcactgggttgtaggtaggcctccagggatgcaactcctctccagccctcctctaaatgctccacaggctcttgaagaaatgaagagaggtatcattgctgtggaaaaatctctggagtcagaggcctgggcgcagctctggactctgcgtataacagtgagtgtcaggatcagggtgagatgggccggaggaggggtgaagggccaaggcctggctgatgacagctagccagttctgacaagtgtgaactgggaagggcctgttgggtttccttcagctgcgatgggcccagcagccctctaccccgcagaggcaggggccacagagctgcctgagatggtgccagacaagtcaggtggcacccttggagaagagcccagcacggctaactgcacctcacaacttgaagtctatgtgctgggcactgagttcaaagtcatcctgaaggacctggtagtctgtggcacctgtaggggaacatgcttcttccctgatgtctgctgctggtgcctttgctccagccacttggaagagattagagtccccaaaccccacagagtcacatctgcagctctgggaatgaagtcaaaacactcctggcttcacaggctgagcttgtggcccacaggatagaagagtggaaggagtagagaggcagacaggaagggacatagaggaaagggagtctcagccccagactaagtcagctcagggagagggcagaagggcctcaggatgggagccctcaccctgtctgggctgcagtggccaaggcaggttgggacaccacttcctggagcctgtcctggccctggccctggccctggccttggccctgcctctgtgggaggaggaggaagtgcatcatcctgggtgggaggagaatcacctggctgttggtacagctctgtgcacagccaggaccactgaccatcatcccatagccctcggaccctcctcttctccctccttgccccttcagggtgcttctcacggtgcacaagcatgtatgtgttatccatggcggggcctggcggtcagtgagcaggtcacttcaagggagccctggggctggcagatgctgggcccgggccagcactggttgtgggagggaaggagctaggtgtgatacctcacaggctacctttctctggaaaagcagtggggccctggaaaggcccaggcttccgtccatttattcaacaaatgtttgtcaagccccaggtatgtgccaggcactcttccaggatctggggatatggcagagaacaaaaccaagtccctgccctctgaagctgacaatccattaaaggagatagagaataaataagtttaaaaataaaattcaattaaaaaggtactttctgaaagtgatgagtgttataaagccagagaagcagagctatggaagcagtggggtctgctctagacaaagtgctcagagcagaagatatgtgagggaagcttgagggaggaggacgactgcggtgggatgaaaaaaggggagggaacagcactgacggatgatcggatgctgggatgggaccagggacagggcaaaggccagtatagccagggccacagtggaggggagaggtggtcaggggtaaagtccaagggggtgggagccagctggggtgggttgtgcaggccaagtaaggagcctggaatttattctaattacagtagccatagtgcagcccttagcgttcttcctgccttcaccctcccacagcgggcttcctgcggcttcccgctcagctgatgtttccttggagttgccctggaacagatgtgaaatcacaagtggtgctgaaagtgggggaaggagggacagcccatggcctggattcatgacagtacctaccttgggtttggggccagggtatggctcctgagcagggaaaggaagcacagacacagctttgttctgcgtcctgccacatggtgtggttgggccactgagaccactgactttatagttaaagaaatctcccttgagttctagcattcggctaatgattgggtcaagtggacagtgctgccgtgagtatccctctcctgaaattctttacggcaatttcagagatgggcttggagaggtttgccatttcaaaccaaatcccttctccatcactcttaagccaaaaaaaaaaaaaaaaaaggaacttttgttacattaaaagaagtgtcccttcctggctgacctgattcttctttcttgctgtcctctctgtgacctccaacctgcccaagcacccatctccccaagcctgagtggcatggcaccccgtgggtgaggaggtggccgctagcacaggcagatggctgagaggaatgtgagggtgagaagcagctatctacaattcttgacagaatcctttcttttcttctttccttcctccctccctccttttctctttcaagcatctacaatctggcaaacccttggcccaaagactcaccaggtgggacgtggcaggcaggcctcagttgaggacgtgatgttttctcacagcagctgcctgggtgaagcatctgctggacaagtcggaccactggccaggggacctttgattgtctttccagagatgctgctctctgcagggcaccaccttcaaggcacagcccttgttgggagggagaaccctctccagaaaccctgccaccatggtgtcttgccgtacttcccacagccgcctttttgcggcctggccggccaggcttcccgtgcgttatacacagagtttgggcacacactgccctccctccgagatgccagaagtttttccacagccttggagaggggctttgactgagggctgggggccctgggctccgtttccttcacattccagctggcccggatccctctgtggcacagggccctgcccgtcacatgccctctgggtgacatcggagcagacctccatgtggccaggggttgggagaactttacaaacattaggacctaacactgtctcatcgctgaaataagaggccatagcaccgaaaagcagcgtgggcgccggctgaggcttctcccagcccgtgggtggcagcgtgctagcacactgccaccatctcaaagccatccccctagccatcgtgagcatcccagcggcaccgccattgtctcaaccagccggctcctcgtctgtacacctggggatttcttttgatttcaagaacagccttaatcattccagtttgatttacgtgtatacctcataaacatttttcttttgtttctctctccccctttctctcttctcttggctcactcccttgcctctccccctccaccaccaccttgtgactgatggtttggtttcctctctgctctgcccctgctcagcacagggagaatgttgacttagaagcaatagggggcagcaggccaccaagagcacaaccccagggcgaggtctggggaggcctcccagcccgcctctgtttactgtgcaattccagtcgttcttaagccatcaccagtgggtgtactcagagcagaggggccaggacttctgccagccaagggaaaggcccagagccctgtgcgggggaatgtggcactgtctatccatccggtggactgggcagcattcctccccagggctcttcccttgggggcctcctttcatctggggcacagccacaagtctcatctctaacgttctatgcaatgaaatataaaccctcaatgacaactgttaatatttaataaattccatgttatgtataaggagttaattgcaaacatgcaattgagaaactggatagatacactcataaaacccccacccctccccaccccacccctgctcccattgtgtgtgtgaaattctcagtctgtggcatgtttgacctgtggcaggactcgctgctgccaggtgagtcaccgcctgtcctgcagtggagcatgcacagctcgcagcctctttgcacgatttcatccattttaaatgcttgaccctcttgcttggagttctttttgcctcagaacctctccttcaggagcacttctagctgacttctgcacaagctagtgaggacctgccagaattgttgcctgagcgtgccaggctgcagggcaggcagtaaaaggcccccacataccctgcagttttctctgtccaggacagcaggtaaaaaggaatccccagagcagacgcaatggtaggagcctgcacaggatgtgtgtgtatggacattctgaaggtttgctgtaggatatctgtctgtctgtcattttcccttcctaccccaaccctgagccagaggcatctgacagccctttcccagagggcaccacgcaagggcagagctgggcggcatccacagccagagaggcagaggcaagagcagagccaggctgtgcccgagggaccccagctcttgactgcacctgtttcatgcctctcctctgtggctaggaggctcaaaggactgtgagccaggagatctgggctggagctagggggtcaatggatgctcaggaagagctgggcctttggcacttgtggtgagaacagttgacagtggtcatctggaactgttcatataaacagtggcttcaagctaagtttcttgtgaagtttctcaatagcaaatcttacagaaggtcctgtgtgaccctctctgcatctgtccccaggacctatgctccctgctcacccccttctccaaagcccaagcgtcccgctgctcatcagcttttttaccattgagccaggagtgcggcaggcagtacctgcctgacccttcaaggcctgaccttcgtccagagtgctctggtttgcaccatgcatttctcaggggtccgcatttctcatgcttttctataagatctacacaccccttcagagagggctcctcgctcacctctggtagctatggatgggacaggaagctgccaacctttgtgttggacttaacacccttgcctttctgggacttggcctcaccccacccatggaatacctgcctcatcccaaagatcaggtatgggctgaatgcagccatctgagcaagggctgagggaagccatcatctaacacctctggccacccaggaccaggtctgtgtggggatgtgccttggagaccaaggcaatagtcctttccactacaggccaggggatgggacaagaagtagggaacaggcagggaaatgttaggaggtcagcctccagcaggcctagtctcaggctctaaagtactgacttttcagcaaatttcctttctggccaagccctctgagtttgaaattctgacatctgccactcctcatcccccactgtacccacaggatacatcatcgcccctctgtgaaggtggctggagcaggcctctggtccatggactgtccttcctggcccttgcatggatgcagttgtgactctggggacaatgcagccagaagctgagggaccagcacttggtgccttggaaagtagagagcaacagacacatctccaaatgggcaaggagtctctagcatgcagcccaggccttctccatacccctctccccagcatcatgagcaagggcattgcctcctctctctgctcacttcagggcccagtgcactcacttcacagtgacagccctcccctacaatccttgggcagagcatgtggtctgagggcccacagtgaaagaacagcagtggtggcaactatgccttgccttctggagcctgtagggagttttccaggcaggtcctttgccaggacagcatggtcctgccctgttgtcccgtctgctctcctcttacccacccccatgctgtaaatacttgtcatcatggactccaacagggttagagggacaggcctaatcaactgaaactcctcggagatgccatctctgtctccctgggtgccagcagccctgctgccatgtgcactggggtggcactggagagccatggcagtcgtgagatattgtatgtgtatgcacatgatcatgtgtgtatgtgcgtgcgtgcgtgtgtgtgtgtgtgtgtgtgtttctgcctcattcagtttctggggtcaaatcagctccttctctccaagtgcactaccctggagagtggtggccactcaataccttttcctctagctttcatgtcttgtttttgctttccccttcctcctccctctctccctttctttccttctctccttctttatttgaggggggaagagtgctgtacaaagtcaaacaaacaagtttacagttgtaagtgcaatgacccgagtcctccacatgaccttgtgaattgtgtgctgtccttctgtgctctgtgagaactcgtggtacttcagtgtccctccccctgtattgtgacaaggtaattctgtggtatcagaataaaaggacttgatataaacaacctacagactgtttctgggatggtttctcaagtgggaaggcttagctgaaggagcaaatccccaaatttgcgacaatcctgtccatggttaaagggaaaaggatggacaaagttgcagaagtgctggcacagcacggggctgagtccacaccaagccatccaaagacaatgggccctccacaaaggtgcccaaggggaggtcccaagcttggacctggagcaggcagtcagtgcgcaggctgttgagggacagcacctccatggccttcaggtgtgttggctgcatacacagctttctgggacctggttccagggaggcagtgaacaagtgctgccccctggtgctgccaacaagccctacacctctctgccttgctccgaattttccaacccccaaactctcaccggctgccagaccttaggccttcctcagatggtcaggagtacctccttaccgaagtcacccagagttgctagaccttttttttttttttttttttttttaacacagataaacaggaatcccagcttcacctctggccctctccccagaattaacattttgatgcgtgtccttctttcctgtttgttgttccagtcttcattttaaacagaagccagaaggtgcaatatatcctgttttctagctttctgtttatttccacgtttatttcaggtacttaaatgttcgtcttccagtgctcaacctccagagagatacaccattagttcatagccagtctaccacacacaatctaaggaacaggcactatgttcccagtgttcctattataaacaatgcttgatgaacatcctattttccaatctttccacccaaattggtggctggggccactcattctactcctgtttctggccttgatacagtcctgtacatactgacaaatgcagtggcgtcagaaagttgggactctttttttttttttttcttgagacggagtttcactcttgttgcccaggctggagtgcagtggcatgatctcggctcactgcaacctccacttcccaggttcaagcgattctcctgcctcagcctcccgagtagctgggattacaggcgcgtgccacccagcccggctaatttttgtatttttagtagagacagggtttctccatgttggccaagctgatcccgaactcctggcctcaggtgatccacccgcctcagcctcccaaagtgctaggattataggcgtgagccaccgcgcctggcacttttttttttttttttttaagatggactctggctgtcgcccaggatggagtgcagtggcgcgatctcggctcactgcaagctccgcctcccgggttcacaccattctcctgcctcagcctcccgagtaactgggactacaggcgcctgccaccatgcccagctaattttttgtatttttagtagagacagggtttcaccgtgttagccaggatggtctcgatctcctgagctcgtgatccgcccgcctcggccttccaaagtgctgggattacaggcgtgagccaccgcgcccggccggcactttttttttttttttttttttttttttacttaactagttatcttgagtaagtaatgatgcggctgatgggaaaggggaagctacaggccagacaagtggactctcaatcacaagcacgccatggagcagggagccagggccctgaatgtggaagaccagccagactcaggtatatggagggaacatccttactgtccagcctctcctgatctctgttggcaccttagcccagccaatcctgtaccacgtgcacagggaacctgcctgcctaggttttttccacaggaagctccctggtcctgggtggagtctgagcccaccaggcctttcacacccaagagctcagggtgaggcctggggaggaaggcagggacccaccagctcacggtccccaacaaggtgccactgagaaggctgggtaaaggctgcggggatagatagctcttgcggcaggcctggcgactgataagtccgggcagcaccctaagagttggcacccgcccctctgccccgcaccccagggctttgcttcgcgccctccgcccggaccctggcccttctcttcttcgtctgcgtggaactccctccagggcagggcctggcactgtgtagtgaatgtcggcctcgtggtggacccgaaggaaccctacagtcagccccagagccgcgggagatccacgctgcggccggctccgccccgcccaaccctcaccctcacgctcacgctcacgctcacgctcacgctcacgctcacaggctcccggctccacattcctcgcagggctccaatccggacccgcccgccttgcccttcatcctcaaagactcattggtcccattcccctcgggccccgcccttcgcgtgcttgggccatgcccgtccgaccgcgctgcttccgccttgcagcaccccctcaaccccttctctcgtaggcccttctaccctccccgaagccgggctcccgggttccgcttccacagggccgccccctctcctccgagatccaacgcctcgcccctcggtaagaggcccaggactcagcccacggccccgccccccacttggctagtccgcccctggcgagacccctgctctcacccacccaggacttctcgctcccaggccgggtcctctcaccgtcaaggcccgccccctgccaacggtcctcacccattagccgaaggccccgcccctcacagattgccgcagggcaggggcggagacagcccgggccgtcccaggctccgcccccggaagcctcacttccgggcgcgagcacgccccgcctcgccccggcggcagagaggagactatggaacgtcaggtgagggctcggcccgcggtccccgtggtccctgcagcccgggccgggcctgaccctggtgtgtcccctgcgcaggtgctgctgagcgagcccgaggaggcggcggctctgtatcggggccttagccgccagcccgcgctgagcgccgcctgcctgggcccggaggtcaccacgcagtacggcggccaataccggacggtgcacactggtgtgtgtgcgaaggggaactggctggcgacggggtcgcgcactggggtgggaaggaagggggtgtggagggctcgctgcttgacagtgcgtaagggtatatagggagccggcctggacttggaggttacactcccacaggtccctgcacacaggtgtgtggagggggggagggggcgtgcggggcgttatcgaatggcggccatgagtgcacgagatgacggcgtaggggtagaagtcaaacctgggctcagggcgtggaccttgtagggctctccaccaacacgccatcccatacacatgccaggctgccctcaagattccagggtggatgctggggttactagggggttctctcaaagaggctgtcagctcaggctctggaggcctggactagggttgtggccaagtgttgtccagcctgcagccagggtgtcagtgtctggagacagattgagagattggggaagatagatctaggccttcctgggtcaggtggggctgggggcagtagccaggagtagccaagacaaggtgagcagtctcatgcctcccctcacagagtggacccagagggacctggaacgcatggagaacattcgattctgccgccaatacctggtgttccatgacggggactcagtggtgtttgcaggacctgcaggcaacagtgtggagacccggggggagtaagtttgagggaggaagcttgtgggcaaggccacagccgtccgcaatgcaagccttttatgaatgctcaccatgtgcctagaagggaggccagcagccaggttcttgcccccttgggagctcattcagtttctggtgacatggcctgataagcactggaagcttgctccaaactcagcctggactagagcccatggtggcctggggagttgcagagagtagagtctctgcctcagggaggaaaggcaaggtggggctagaggtgctccagaagctggtgtggggccagagcctcaagaatctctcctaagaggtgtgcccagtagggagcaggaaggggttattgcaagataatcctgacctgtgctaccccatgtccacagactgctgagcagagagtctccttcaggcaccatgaaagctgtgctgcgcaaggctggaggcacgggccctggggaagagaagcagttcctggaggtgagtctgcatgggaccaggtagtgggtgacaagagagaggctctgccccacagataaggctctgttagcgggcaaacagcctaatgcccagatgtcctcaggtctgggagaagaaccggaagctcaagagcttcaacctgtcagcgctggagaaacatgggcctgtttatgaggatggtgaggcatctggctggtgagcaggcagggtggacaggaggggtagccgtagccctgggccccccctgattggccctccctgcacccagactgctttggctgcctgtcctggtcgcactcggagacacacttgttgtatgtggcagagaagaagcgccccaaggccgagtccttctttcagaccaaagccttggacgtcagtgccagcgatgatgagatagccaggctgaagaagccagaccaagccatcaaggtgctcgtggtcaatccacgaaggcccggcagggcagccctggggctcagtgtgctcccttcccatactgtgcctgtcagacctggggaggcactagcttctaggaagcagagcaggtcctatagacaggctgggcattgagtatcttgtgttctcagggggatcagtttgtgttttatgaagactggggagaaaacatggtttccaaaagcatccctgtgctctgcgtgctggatgtcgagagtggcaacatctctgtgcttgagggggtccctgagaatgtgtcccctggacaggtcagcagcaacagcctgtgtcccccctggagtctgggacccttcttgagctaccaccccttgctcactcctgccctttgatcctgtttacaggcattttgggcccctggagatgctggtgtggtgtttgtgggctggtggcatgagcccttccggttgggcatccgcttttgcaccaatcgcaggtgagggagtggggcaaggcaaggggccttgcagcccagctggccttgagactgagtgtctgtctcgtggttccaggtcagccctgtattatgtggacctcatcggggggaagtgtggtaagtggctgatgcccacctgtgctttgctgacacatgttggccctgccagcctgcgtgatgctcatgtttccatctggcccagagctcctctcggatgactccctggctgtctcttctccccggctgagcccagaccaatgtcgcattgtctacctgcagtacccatctctgatcccccatcaccaatgcagccagctgtgcctggtgagctggaggtggcagggatgggagggtggtcagcaagaagatgggatggtggatgagagctgaagggccagtatcatctccccataggccctcagtaggtgcccttctgtcctcaatgcagcagcggtgtgagttctgcctgtcctctcaaggagggcctagaggttgagagtgctgccatggagagctttgcactgttggggcattccaccttgagagaatgctcgtctgcaagaatgctcctccccttggctctcaactgcatgtagccaggctctgcaaggggctgggatatagtggggagttacacaatcccagaccctccccaggaagagctctgggcccctggtaaaagtcagagggacatgcctatctgaggccccttgggcatctggtccaggtcaccagaaaagagatacatcaggcttattccagttcccccatctcctggggctacctgaggcaaaaggggataggcacagggcactgtgccctaagggaactgcctgtcccctactggacctgaccattgtgttctcttgcagtatgactggtataccaaggttacctcagtggtggtagatgttgtgcctcggcagctgggaggtaaggcatacctggctgggtgggtgcagtggggcctgtagctctgctttcctgccgtctgttgcatccctgccccgttcttctttcctaggttccttctgagggccctacctccctgctgggccagccttatgcccagcatcctcagggagcggggctgtcaccatagggagcggggctgtcaccgtagggaacagttcaatagcaaggagtggtaggaccaagctgagatcagagtggcccaagttgatgatgtattatttcctgtgctgcaggtcataattagatttttcttatttttccaatggctggttcaaaccaaaaccatgactccttcaagtgggtctcaggaagtgcactaggttggaatgtcacactcgagaggctctggacccgagggcatgatattatcccatccaccatcctaaccccagcaacctttgtccagtctaagccctgaagtcagctgggtcttcaggagggtggctcttggctgagaggctcccgtctcgagtgttgatagctctgcttggatcctcctggaccatctcaaggatgagtctcttgttttctcaggccacccggtcagttccaggagttcagtggacaagggatagcctctttgtcttctctttgggttgcagggatgcagtggtgggaacctagtatgaatcccagctctgccctaaattagctgtgtcctcagacagggtcctggcctccctgagctcccatttcttcatggaggggtgattgtgtctgcctgcctcataggatcatagtgagtgttaagtgagtgatgatattaaagggtaggatttactgagccccctgtgccaagcgctgtgctaagcaccacagtggagataagacggacagatgatatcttggttaaagcacctggtacctacctgggttcaactggaattactcaggagagcaagtgcttttcctctgagcacccatggtttctctctggagctcttgagctctgcctctctgggtcctctctgggtcccaagaggcctctgcccctcagccacctactcaggcagctcctcatcgcgtagcgtgcccccatgtgtgctacaagctgcaggggcctgactggtgcctgagtagggccctgggtgaattccccagtaccctagccttccttgtagactaccctccctacctccactcctggatgcagcctcagccctcctatctttacagagaacttctctgggatctactgcagccttctgcctttgggatgctggtcagctgacagccagagagtggtctttgactcggctcagcgcagccggcaggtgagggacgctgattgtgttgaggggcagcccctgtggtcaacccccaggagccctgggggttgcatgtgcatgcccctgggtggaatgcccagccacaaagtctcatcagccccttaaaaccctgcctgcccatcctggactcatttctcctggaggggactggctgccctggtgcaccacagcagaactcaggccttttcgtctgaggcagagatgcaacccctcccaggcatttctagctgggggtcaaggggactgccactcgggtgggtccctgaacactctgtaatggcagctgatggggacaggactgaggccttcccccagggatggagtaaagccactcacagtgtgccaggctccttttgggtgtgatatttggtccttgtgccaactcaaaggggctcaaagccattccttaccttgcccagggtcacccagcaagttgtgatggtgctgggatttgaacccaggccctcacactactccctactgcactgagtaaccatcaccatagctgtccacagccttggtctggccagggctctccaagagggtagagaggaggtaggggagggacccataggtagagggagtactcttggatgtggtcgcacctgtggccttgcctctgcttcaggacctgtttgctgtggacacccaagtgggcactgtgacctccctcacagctggtgagcaaggctttggggatgggggtaagggcagggctggtgagcaagccaaccaggcagcgggggactggagctccaacatgtggggcagtgatggcattctcagccactcagcaccactgactgttccacagcctttactaacaggtccccaaggcccctgtctgtgcagacccttacccaaccaacagactagcttccctgctctactgccctttagcactcaactctgttccatgtgtcctggcccagcctcagcacggcccccacctctgctcctaaaacccacaaaactctctcttatcaagatctgccagactcatccttctcgctctgcaaaccttgggtgcctgtctcaggcagaggcagctctgccacctgagggcccaggaaaagcccagtgttgactcccccgtcttccccatacttaggcctggtgattctgcctttgaaatgtgttttgagtcctccacctgacctgactgtatccgctcctccacaaagctaccaaagtatcattccaaagctacatctcattgtacaactgcttggacaccactgccccaaatcagcacgctccccgacccccaacttcccggtcccagctgccaccctgcacacagcagccatcgagggacaggcagatgtgcctgcatggtctgatgtgtcttaaggtttggcagttcccagcccagccagtgtctgtcagatgaacaacagactgagagcaggaggctcacccggggccatgtgcagttgggtgtttgtgaaaggcacttctcggggagaaaagggcacctttccatagagtctccagcctgggactctgttacagagaagcaggtaagaaaggtgatggctcctgctaagcacttaatggcatctgccttttccaggagggtcaggtgggagctggaagttgctcacaattgaccaggacctcatggtggcacagttttccacacccagcctacctccaaccctggtgagtgtcggtgggtcccaggctgtggaggcaggggttctgggcaggcagagctcaccaggtcagggaattggccccagagtctgacctggctggtcagcatacagacgggccaagacacaggcccagcttggcatggtccatgagggtttggcactcacagggacgaactactaggctagaatctgctccgtacaaaacaaggtgcctggggaagtgctctgtcttggtattacagagcaaaggagacagcagagcctagaagctgaggagggaggggtgtgcctgtgtgtgattgtatgagtatgaataccttggtatataccatcccacaacaggaagccatgctgtaccttctggaggtgggtagagggcccagcatagtgagagctgcctatttcccactgtgggcagaagggaagggcagggaggcagccaggccacctatgacacattctttccccttggcagaaagttgggttcctgccttctgcagggaaggagcagtcagtgttgtgggtgtccctggaggaggccgagcccattcccgacatccactggggcatccgggtgctacagccacccccagagcaagagaatgtgcagtatggtgagctgggccaggggcagagggatgccttctccaggttccccagcacaaagcctctgcggtgacctttgctacctcctctctcacattgtggggtttctggtgatgacctctaagaggttttctgttcctcttgtggatgggcatgggaagtagcatctagacatctgagcgcctgctctggatatcacctgggcttcaccaggccaaatcatctgtggttggaagacccaggtccaaagaaaataggcctcatacaagcctcagtgaccacacctcatcccgaatgctgttgctgcaggatggggttc

SEQ ID NO: 2436 - DNA, 15022 bp, Homo sapiens
cgagccgagctgggagatggcggcggcagcggcggcgccgagagtgtgagcaccgcccgggagccgccggcccgggcgcagcgcgaccccgaccccgcccgcccgcctgcccgccatgggcaacgaggtcagcctggagggcggcgctggcgacgggccgctgccgcccggcggcgccggccccggcccgggccccggccccggccccggcgcaggaaagccgccttcagcaccggccggtggcggacagctccccgcggcgggagcagcgcggtcgaccgcggtaccaccggtccctggccccggccccggccccggtcccggccctggcccgggcagcacttcccggagactggaccccaaggaacccctgggtaaccagagagcagcttccccaactccgaagcaggcttctgctaccactcctggccatgagagcccccgagagacaagggcacagggaccagcaggccaggaggctgatggtccccgcaggacgctgcaggtagacagcaggacacagagatcagggcggtccccctcagtgtcaccggacagaggcagcacccccacatcaccctactccgtccctcagatcgccccccttcccagcagcacgctgtgtcccatatgcaagacttcggacctcacgtcgacccccagccagccaaacttcaacacctgcacccagtgtcacaacaaggtctgcaaccagtgtgggttcaaccccaaccctcatctcacccaggtgaaggagtggctctgtctgaactgtcagatgcagagggctctgggaatggacatgaccactgcacctcgctccaagagccagcagcagctgcactccccagccctgtctcctgcccactccccggccaaacagcccctggggaagccagaccaagagagatctcggggcccaggaggaccacagcctgggtcccgccaggctgagacagccagggccacctcagtgccggggcctgcccaagcagctgcccctccagaggtggggagggtgtctcctcagccccctcaacccaccaagccttccacagctgagcccaggccacctgcaggagaggccccggccaaaagtgccaccgcagtgcccgctgggcttggtgccactgagcagacccaggagggcctcactggtaagctcttcggccttggcgcgtcactgctaacccaggcgagcaccctcatgtctgtgcagcccgaggctgacacccagggccagcctgcccccagcaaggggacacctaagatcgtcttcaatgatgccagcaaggaggctggcccaaaacccttgggctcagggcccgggcctgggccagcacctggagccaaaactgagcctggggctagaatgggtcctggatctggacctggagccctgccgaaaactgggggaacaaccagtccaaagcatggcagagcagaacatcaggcagcatcgaaggctgctgccaagccaaagaccatgccgaaggaaagggccatctgcccactgtgccaagccgagctcaacgtgggcagcaagagcccagccaactataacacatgcaccacctgcaggctccaggtgtgcaacctgtgtggcttcaacccaacaccccacctggtggagaaaacagagtggctctgtctgaactgccaaaccaagcggctactggagggcagcctaggagagccgacccccctgccgccgcccacctcacagcagccccctgtaggggcccctcaccgtgcatctggaacatcccctctgaagcagaaagggccacaggggctgggccagccttcaggccccctgcctgccaaggccagccctctatccaccaaggccagccctctgcccagcaaggccagcccccaggccaagcccctcagggcttctgaacccagcaagaccccaagcagtgtccaggaaaagaagacccgagtccccactaaagctgagcccatgccgaagccacctccagagactaccccaacccctgcgactcctaaagtaaagagtggggtgaggagggctgaacctgccacccctgtcgtcaaggctgttccagaagcccccaagggtggggaggcggaggacctggtgggcaagccttactctcaggatgcgtctcggagcccacagagcctcagtgacacaggctattcctctgacggcatctctagctcccagagtgagatcacaggagtcgtgcagcaggaggtggaacagctggacagtgcaggggtgacagggccacatccacccagcccctccgagatccacaaggtggggagcagcatgcggcctttgctgcaggcccagggcctggccccaagtgagcggagcaagccactctccagcggtactggcgaggagcagaagcagcggccccactccttgtccatcacgcctgaggcctttgactctgatgaggagctggaggatatcctggaggaagacgaagactctgctgagtggaggcgccggagagagcagcaggacactgccgagtcctcagacgactttggcagccaattgaggcacgactatgtggaggacagcagtgagggtggcctgtcccctcttccaccccagcccccagcccgggcagcagaactgactgatgaggatttcatgcgacggcagattctcgagatgagcgccgaggaagacaacctggaggaggatgacactgccacctccgggcgtggcctggccaaacatggcacccagaaaggtggccccagacccaggcctgagcctagccaagaaccagcagcactgcccaagaggcgcctgccccacaatgccaccacgggctatgaggagctgctccctgagggaggctcagcagaggctaccgatggcagtgggaccctgcagggtgggctccgtcgcttcaagaccattgagctcaacagcacgggaagttatggtcatgagttggacctgggccaaggcccagaccccagtctggaccgggagcctgagctggagatggagagcctaacgggctcccctgaggaccgctcccgtggtgagcactcctctacattgcctgcctccacacccagctacacctcgggcacctctcccacctctctgtcctccctagaggaggacagtgacagcagccccagccgcaggcagcgtctagaagaagcaaagcagcagcgcaaggcccggcaccgctcccacgggcccctgctacccaccatcgaggactcctcagaggaggaggagctgcgggaggaagaggagctgcttcgtgagcaagagaagatgcgggaggtggagcagcagcgcatccgcagcacggcccgcaagacccggcgggacaaggaagaactgcgggcccagcggaggcgagagcgctccaagacaccacccagtaacttgtcacccatcgaggatgcctccccgacggaggagctgaggcaggcggccgagatggaggagctacaccgctcctcctgctctgagtactcaccctcaccctcccttgactctgaggctgaggccttggatggtggccctagccggctttacaagtcaggcagtgagtacaacctgcccaccttcatgtccctctactcaccaaccgagacaccctccggcagctccaccactcccagttccggacggccgctcaagagcgctgaggaggcttatgaggagatgatgcgcaaagctgagctgctccagaggcagcaaggccaggcagcaggggcccggggaccccatggcggcccctctcagcccacaggcccccggggcctgggctccttcgaatatcaagacactacagaccgtgagtatggccaggctgctcagcctgccgcagagggcacgccagccagcctgggagcagccgtgtacgaagaaatccttcagacatcacagagcatagtccgcatgcggcaggcctcctcacgagacctggcttttgctgaggacaaaaagaaggagaagcagtttctaaatgctgagagtgcatacatggacccaatgaagcaaaatggtggcccccttacccctggtaccagtcccacccagctcgctgcccctgtgtccttctctacccccacctcctcagacagcagcgggggccgagttattcccgatgtccgtgtcactcagcattttgcaaaggagactcaggaccccctcaagctgcacagctctcctgcctcccccagctcagcctccaaggagataggcatgcccttttcccagggccctgggaccccagccaccacagctgtggctccttgtccagctgggctgccacgaggatatatgactccagcctccccagcaggctccgagcgtagtccttcaccatcttccacagcccacagctatggacacagcccaaccactgcaaactatgggtcccaaactgaggatctaccccaggcccccagtggccttgctgcagctggacgagctgctagagagaagcccttgagtgcgagtgacggtgagggtggcactcctcagccttcccgggcatattcctactttgcaagctccagcccacctctctccccgtcttccccctcagagagtcccacattctcccctggcaagatgggcccaagggccacagcagagttctctacacagacgccaagtccagcccctgcctcagacatgccacggagccctggtgcccccactccatcacctatggtagcccagggtacacaaacaccacatcgacccagcacgcctcgcctggtgtggcaggagtcctctcaagaggctccctttatggtcatcacgctggcatctgacgcctccagccagaccaggatggtacatgccagtgcctccacctccccgctctgctcacctactgaaacccagcccaccacccatggctacagccagacaacacctccgagtgtgtctcagctgcccccagagccacctgggccacctggctttccacgggtgcccagtgctggtgcagatgggcccctggcactatatggctggggtgccctccctgctgagaacatctccctgtgccggatctcctctgtccctgggacgtctagggttgagccaggccccaggacccctggcactgcagtggtagacctccgtacagctgtcaagcccactcccatcatcctcactgaccagggcatggacctcacctctcttgctgtggaagcgaggaagtatggtcttgccctggatccaatcccaggacggcagtcgaccgccgtgcagcccttggttatcaacctcaatgcccaggagcataccttccttgctactgccaccaccgtgagcatcaccatggcctcgtctgtgttcatggctcaacaaaagcagcctgtggtctatggagacccctaccagagccgccttgactttggccagggtgggggtagccctgtgtgcctggcccaggtcaaacaagtagagcaggctgtccagacagccccataccgaagtgggccccggggaagacccagggaggccaagtttgccagatataacctacccaaccaagtagctcctctggccagaagagacgttttgatcactcagatgggcaccgcccagagcattggcctcaagccaggcccagtgccagagccaggtgccgagccccaccgggccacccctgcagagctgcggtcacatgctctgccaggtgccaggaagccacacacagtggtggtgcagatgggagagggcacagcaggcactgtgaccacactgctcccagaggagcctgcgggtgccctggaccttaccgggatgaggcctgagagccagctggcatgctgtgacatggtctacaagctcccctttggcagcagctgcactggcaccttccacccggcccccagtgtgcctgagaagagcatggcagatgctgccccacctggccaaagcagcagccccttctatggtccccgggaccctgagcctcctgagcccccaacctaccgggcacagggggtggtggggcctgggccccatgaggagcagaggccctacccacaaggcctgcctggtaggctgtactcctccatgtctgacaccaatttggctgaggctggcctcaactaccatgcccagaggatcgggcagctcttccagggtcctggacgagactcggctatggacctcagctcactgaagcactcctacagcctgggctttgcggatggacgctacctagggcagggcttgcagtatggctcagtcacggacctgcgtcatcctacagaccttttggctcacccgcttcccatgcggcgctatagctcagtgtcgaacatctactcagaccacaggtacggcccacggggagatgcagttggcttccaggaggccagcctggcccagtacagtgccaccacagcccgtgaaatcagtcgcatgtgcgctgccctcaactccatggaccagtatggtgggcggcatggcagtggtggtggtggccctgaccttgtgcagtaccagccccagcacgggcccgggctcagtgctccacagagtctggttcccctcagacctggactccttggtaaccccacctttccagagggccacccaagtcctgggaacttggcccagtatgggcctgcagcaggccaaggaacagcagtcagacagctgctgccgtccacagccactgtacgtgcagctgatggcatgatctactcgactatcaataccccaattgctgcaacactgcccatcaccacccagcctgcctcagtcctgcggcccatggtgcgtggtggcatgtacaggccttacgcatctggtggaatcacagccgtgccactcaccagtctgacacgtgtgcccatgattgccccccgggtacctcttggacccacagggctgtaccgctatcctgcaccaagtagatttcccattgcttccagtgttccacctgcagaagggcctgtctatctggggaaacctgctgctgccaaggcccctggggctgggggcccttcaaggccagagatgccagtaggggctgcacgggaagagcctcttcccacaaccacccctgctgccatcaaggaggctgcaggagccccagctcctgccccactagctggccagaagccaccagcagatgctgctcctgggggtggcagtggggccctcagccggccagggttcgagaaagaggaagcatcacaggaggagaggcagcggaagcaacaggagcagctgctccagctagagcgggagcgggtggagttggagaagctgcgacaacttcggctgcaagaggagctagagcgggaacgtgtggagctgcagaggcaccgtgaggaggagcagctgctggtgcagcgggagttgcaggagctgcagaccatcaagcaccatgtgctgcagcagcagcaagaggaacgccaggctcaatttgcactgcagcgggaacagctagcgcagcagcgtctgcagctggagcagatccagcagctgcagcagcagctgcagcagcagctagaggagcagaagcagcggcagaaggctccctttcctgcagcctgtgaggcacctggccgagggcctcccctagcggctgctgagttggcccagaatggccagtattggcccccccttacacatgcagccttcattgccatggcagggcctgaaggacttgggcagcctcgtgagcctgtgctgcaccggggtctccccagctctgcctcagacatgtcactgcaaacggaggagcagtgggaggccagccgtagtggcatcaagaagcggcactccatgccacgcctgcgggatgcctgtgagctagagtctgggactgagccctgtgtggtcaggaggattgccgacagcagcgtgcagacagacgatgaggatggggagagccgctacctcttgagtcggcgacgccgggcacggcggagtgctgactgcagtgtgcagacggacgacgaagacagtgctgagtgggagcagccagtgcgccgccgcaggtctcgtcttccccgccactcagactcaggctctgacagcaagcacgatgccactgcctcatcatccagtgctgctgccactgtgagggccatgagcagcgtgggcatccagaccatcagtgactgctccgtgcagacggagcctgaccagctgcccagggtctctccagccatccacatcacagctgccaccgatcccaaggtggagatcgtcaggtacatatcggcgccagagaagactgggcgtggggagagcctggcctgccagacggagccagatgggcaggcccagggtgtagccgggccgcagcttgtagggccaactgccatcagcccctacctgcctggcatccagatcgtcaccccagggcctctgggcagatttgaaaaaaagaagccagatcccctggagattgggtaccaggcccacctgcctccggagtctctctcacagcttgtgagccgccagcctcccaagtcccctcaggtcctctactcaccagtctcacccctgtcccctcaccggctcctggacacctcctttgcttccagtgagaggctgaacaaagctcacgtgagtccccagaagcacttcacggctgacagcgctctccgccagcagacgctgcctcgccccatgaagaccctgcagcggtccctgtctgaccctaagcccctcagccccaccgccgaagagtctgccaaagagagattctccctctaccagcaccaggggggactgggtagccaggtgtcggcgttgccacccaacagcctggtccgcaaggtgaagcggacactgcccagcccccctccagaggaggctcaccttcccctggctggccaggcctccccacagctgtatgcagccagcctgctgcagcgagggctgacggggcccaccactgtccctgctaccaaggccagcctgctccgggagctggaccgggacctgcggctggtggagcatgagtccaccaaactgcgcaagaagcaggcagagctggatgaggaggagaaggagattgacgccaagctcaagtacctggagttgggtatcacacaacgcaaagagtctttggccaaagaccggggtggccgtgactacccacccttgcgtggtcttggcgagcatcgtgactacctatcggacagtgagctcaaccagctgcggctccagggctgcaccactcccgctggccagtttgtggacttccctgccactgccgctgctcctgccaccccctctggtcccactgccttccagcagccccgcttccagcctccagccccacagtattctgcaggcagtggtgggccaactcagaacggattcccagcccaccaggcccccacctaccctggccccagcacgtacccagctcctgcctttcctcctggtgccagttacccagctgagcctggcctgccaaaccagcaggctttccgccccacaggccactatgcaggccaaacacccatgccaaccacacagagcaccctttttccagtccccgctgatagccgtgccccactgcagaagccacgccagacatcgctagccgacttggagcagaaggtgcccaccaactatgaggtgatcgccagccccgttgtgcccatgtcttcagccccatctgaaaccagctacagtggcccagcagtgagcagcggctatgagcagggcaaggtccctgaggtgccccgggctggtgaccgtggcagtgtgagccagagcccagcccccacctacccctctgactcacactataccagtctggagcagaacgttcctcgaaactacgtaatgattgatgacatcagtgaactgaccaaggacagcacctctactgctcctgatagccaacggctggagcccctggggccaggcagcagtgggcgtccagggaaggagcctggagaaccaggtgtccttgacgggcccacactgccctgctgctatgccagaggagaagaggaatctgaggaggactcatacgatccccgcgggaagggtggccacctccggagcatggagagcaatggtcgaccagccagtacccactactatggtgacagtgactacaggcatggggctcgagtagagaagtatggtccagggcccatggggcccaagcatccctccaagagcctggctccagctgccatctcctcaaagcgcagcaagcaccggaagcagggcatggagcaaaagatatccaagttctcgcctattgaagaggccaaagacgtagagtcagacctggcgtcctaccccccacctgcagtcagcagcagcctggtctctcggggcaggaagttccaggatgaaatcacctatgggctcaagaagaacgtgtatgagcagcaaaaatactatgggatgtccagccgggacgcagtggaggacgaccgcatttatggcgggagcagccggtcccgggcaccttctgcatacagtggggagaagctgtccagccacgacttcagtggctggggcaaggggtacgaaagggaacgggaggctgtggagcgacttcaaaaagcgggccccaagccctcatccctaagtatggcccacagccgggtacgaccccccatgcggagccaggcctctgaagaggagagccccgtcagtcctttggggaggccccgccctgccggagggcccctccctcccggcggggatacctgcccacagttctgctccagccactccatgcctgatgtccaggaacatgtcaaggacggacctcgggcccacgcatataagcgtgaggagggctacatcctggatgattcccattgcgtggtttccgacagcgaagcgtatcacctgggccaggaggagacggactggtttgataagccccgggatgcccgctctgaccggttcaggcaccacgggggccatgcagtttcctcctcctcccagaagcgaggccctgccaggcacagctaccatgactacgatgaaccccctgaggagggcctgtggcctcatgatgagggtggcccaggccgccatgcctcagccaaggaacaccggcacggtgaccacgggcggcactcaggccgccacactggtgaggagccgggacggcgtgctgccaaaccacacgctcgggacctgggtcgccatgaggcccggccccactctcagcccagctctgctccagctatgccgaagaagggtcagcctgggtatcccagctctgctgagtactcacagccatcccgtgcttcatccgcataccatcatgcctctgacagcaagaagggctcccggcaagcccactccgggcccgctgcactgcagtcaaaggcagaaccccaggcgcagccgcagctgcaaggtcggcaggcagctccaggaccacagcagtcacagtcaccatcatccaggcaaataccctctggggcagcatcacgccagccacagacacagcagcagcagcaaggtcttgggctgcagcccccacagcaggctctgacacaggctcggctgcagcaacagagccagccaaccacccggggctcagcccctgctgccagccagcctgcagggaagcctcagccaggccccagcacagccacaggtcctcaaccagcaggaccgccacgggcagaacagacaaatggctctaaagggacagccaaagcaccgcaacaggggagggctcctcaggcccagccaacaccaggacctggacctgcaggtgtgaaggctggagccaggcctggaggaaccccaggggctcccgccggccagccaggtgccgatggggagagcgtgttctccaagatcctccctggcggggcagccgagcaagctggcaaactgacggaagctgtctctgcttttggcaaaaaattttcctcattctggtgaccatgcccagcatggctcttgaagaaatgaagagaggtatcattgctgtggaaaaatctctggagtcagaggcctgggcgcagctctggactctgcgtataacacatctacaatctggcaaacccttggcccaaagactcaccaggtgggacgtggcaggcaggcctcagttgaggacgtgatgttttctcacagcagctgcctgggtgaagcatctgctggacaagtcggaccactggccaggggacctttgattgtctttccagagatgctgctctctgcagggcaccaccttcaaggcacagcccttgttgggagggagaaccctctccagaaaccctgccaccatggtgtcttgccgtacttcccacagccgcctttttgcggcctggccggccaggcttcccgtgcgttatacacagagtttgggcacacactgccctccctccgagatgccagaagtttttccacagccttggagaggggctttgactgagggctgggggccctgggctccgtttccttcacattccagctggcccggatccctctgtggcacagggccctgcccgtcacatgccctctgggtgacatcggagcagacctccatgtggccaggggttgggagaactttacaaacattaggacctaacactgtctcatcgctgaaataagaggccatagcaccgaaaagcagcgtgggcgccggctgaggcttctcccagcccgtgggtggcagcgtgctagcacactgccaccatctcaaagccatccccctagccatcgtgagcatcccagcggcaccgccattgtctcaaccagccggctcctcgtctgtacacctggggatttcttttgatttcaagaacagccttaatcattccagtttgatttacgtgtatacctcataaacatttttcttttgtttctctctccccctttctctcttctcttggctcactcccttgcctctccccctccaccaccaccttgtgactgatggtttggtttcctctctgctctgcccctgctcagcacagggagaatgttgacttagaagcaatagggggcagcaggccaccaagagcacaaccccagggcgaggtctggggaggcctcccagcccgcctctgtttactgtgcaattccagtcgttcttaagccatcaccagtgggtgtactcagagcagaggggccaggacttctgccagccaagggaaaggcccagagccctgtgcgggggaatgtggcactgtctatccatccggtggactgggcagcattcctccccagggctcttcccttgggggcctcctttcatctggggcacagccacaagtctcatctctaacgttctatgcaatgaaatataaaccctcaatgacaactgttaatatttaataaattccatgttatgtataaggagttaattgcaaacatgcaattgagaaactggatagatacactcataaaacccccacccctccccaccccacccctgctcccattgtgtgtgtgaaattctcagtctgtggcatgtttgacctgtggcaggactcgctgctgccaggtgagtcaccgcctgtcctgcagtggagcatgcacagctcgcagcctctttgcacgatttcatccattttaaatgcttgaccctcttgcttggagttctttttgcctcagaacctctccttcaggagcacttctagctgacttctgcacaagctagtgaggacctgccagaattgttgcctgagcgtgccaggctgcagggcaggcagtaaaaggcccccacataccctgcagttttctctgtccaggacagcaggtaaaaaggaatccccagagcagacgcaatggtaggagcctgcacaggatgtgtgtgtatggacattctgaaggtttgctgtaggatatctgtctgtctgtcattttcccttcctaccccaaccctgagccagaggcatctgacagccctttcccagagggcaccacgcaagggcagagctgggcggcatccacagccagagaggcagaggcaagagcagagccaggctgtgcccgagggaccccagctcttgactgcacctgtttcatgcctctcctctgtggctaggaggcctagtctcaggctctaaagtactgacttttcagcaaatttcctttctggccaagccctctgagtttgaaattctgacatctgccactcctcatcccccactgtacccacaggatacatcatcgcccctctgtgaaggtggctggagcaggcctctggtccatggactgtccttcctggcccttgcatggatgcagttgtgactctggggacaatgcagccagaagctgagggaccagcacttggtgccttggaaagtagagagcaacagacacatctccaaatgggcaaggagtctctagcatgcagcccaggccttctccatacccctctccccagcatcatgagcaagggcattgcctcctctctctgctcacttcagggcccagtgcactcacttcacagtgacagccctcccctacaatccttgggcagagcatgtggtctgagggcccacagtgaaagaacagcagtggtggcaactatgccttgccttctggagcctgtagggagttttccaggcaggtcctttgccaggacagcatggtcctgccctgttgtcccgtctgctctcctcttacccacccccatgctgtaaatacttgtcatcatggactccaacagggttagagggacaggcctaatcaactgaaactcctcggagatgccatctctgtctccctgggtgccagcagccctgctgccatgtgcactggggtggcactggagagccatggcagtcgtgagatattgtatgtgtatgcacatgatcatgtgtgtatgtgcgtgcgtgcgtgtgtgtgtgtgtgtgtgtgtttctgcctcattcagtttctggggtcaaatcagctccttctctccaagtgcactaccctggagagtggtggccactcaataccttttcctctagctttcatgtcttgtttttgctttccccttcctcctccctctctccctttctttccttctctccttctttatttgaggggggaagagtgctgtacaaagtc

SEQ ID NO: 2437 - protein, 3880 aa, Homo sapiens
MGNEVSLEGGAGDGPLPPGGAGPGPGPGPGPGAGKPPSAPAGGGQLPAAGAARSTAVPPVPGPGPGPGPGPGPGSTSRRLDPKEPLGNQRADTPKQASATTPGHESPRETRAQGPAGQEADGPRRTLQVDSRTQRSGRSPSVSPDRGSTPTSPYSVPQIAPLPSSTLCPICKTSDLTSTPSQPNFNTCTQCHNKVCNQCGFNPNPHLTQVKEWLCLNCQMQRALGMDMTTAPRSKSQQQLHSPALSPAHSPAKQPLGKPDQERSRGPGGPQPGSRQAETARATSVPGPAQAAAPPEVGRVSPQPPQPTKPSTAEPRPPAGEAPAKSATAVPAGLGATEQTQEGLTGKLFGLGASLLTQASTLMSVQPEADTQGQPAPSKGTPKIVFNDASKEAGPKPLGSGPGPGPAPGAKTEPGARMGPGSGPGALPKTGGTTSPKHGRAEHQAASKAAAKPKTMPKERAICPLCQAELNVGSKSPANYNTCTTCRLQVCNLCGFNPTPHLVEKTEWLCLNCQTKRLLEGSLGEPTPLPPPTSQQPPVGAPHRASGTSPLKQKGPQGLGQPSGPLPAKDLSTKDLPSKDQAKPLRASEPSKTPSSVQEKKTRVPTKAEPMPKPPPETTPTPATPKVKSGVRRAEPATPVVKAVPEAPKGGEAEDLVGKPYSQDASRSPQSLSDTGYSSDGISSSQSEITGVVQQEVEQLDSAGVTGPHPPSPSEIHKVGSSMRPLLQAQGLAPSSKPLSSGTGEEQKQRPHSLSITPEAFDSDEELEDIEDEDSAEWRRRREQQDTAESSDDFGSQLRHDYVEDSSEGGLSPLPPQPPARAAELTDEDFMRRQIMSAEEDNLEEDDTATSGRGLAKHGTQKGGPRPRPEPSQEPAALPKRRLPHNATTGYEELLPEGGSAEATDGSGTLQGGLRRFKTIELNSTGSYGHELDLGQGPDPSLDREPELEMESLTGSPEDRSRGEHSSTLPASTPSYTSGTSPTSLSSLEEDSDSSPSRRQRLEEAKQQRKARHRSHGPLLPTIEDSSEEEELREEEELLREQEKMREVEQQRIRSTARKTRRDKEELRAQRRRERSKTPPSNLSPIEDDTEELRQAAEMEELHRSSCSEYSPSPSLDSEAEALDGGPSRLYKSGSEYNLPTFMSKPTETPSGSSTTPSSGRPLKSAEEAYEEMMRKAELLQRQQGQAAGRPHGGPSQPTGPRGLGSFEYQDTTDREYGQAAQPAAEGTPASLGAAVYEEILQTSQSIVRMRQASSRDLAFAEDKKKEKQFLNAESAYMDPMKQNGGPLTPGTSPTQLAAPVSFSTPTSSDSSGGRVIPDVRVTQHFAKETQDPLKLHSSPDSSASKEIGMPFSQGPGTPATTAVAPCPAGLPRGYMTPDAGSSPSPSSTAHSYGHSPTTANYGSQTEDLPQAPSGLAAAGRAAREKPLSASDGEGGTPQPSRAYSYFASSSPPLSPSSPSESPTFSPGKMGPRATAEFSTQTPSPAPASDMPRSPGAPTPSPMVAQGTQTPHRPSTPRLVWQESSQEAPFMVITLASDASSQTRMVHASASTSPLCSPTETQPTTHGYSQTTPPSVSQLPPEPPGPPGFPRVPSAGADGPLALYGWGALPAENISLCRISSVPGTSRVEPGPRTPGTAVVDLRTAVKPTPIILTDQGMDLTSLAVEARKYGLALDPIPGRQSTAVQPLVINLNAQEHTFLATATTVSITMASSVFMAQQKQPVVYGDPYQSRLDFGQGGGSPVCLAQVKQVEQAVQTAPYRSGPRGRPREAKFARYNLPNQVAPLARRDVLITQMGTAQSIGLKPGPVPEPGAEPHRATPAELRSHALPGARKPHTVVVQMGEGTAGTVTTLLPEEPAGALDLTGMRPESQLACCDMVYKLPFGSSCTGTFHPAPSVPEKSMADAAPPGQSSSPFYGPRDPEPPEPPYAQGVVGPGFEQRPYPQGLPGRKSMSDTNLAEAQYHAQRIGQLFQGPGRDSAMDLSSLKHSYSLGFADGRYLGQGLQYGSVTDLRHPTDLLAHPLPMRRYSSVSNIYSDHRYGPRGDAVGFQEASLAQYSATTAREISRMCAALNSMDQYGGRHGSGGGGPDLVQYQPQHGPGLSAPQSLVPLRPGLLGNPTFPEGHPSPGNLAQYGPAAGQGTAVRQLLPSTATVRAADGMIYSTINTPIAATLPITTQPASVLRPMVRGGMYRPYASGGITAVPLTSLTRVPMIAPRVPLGPTGRYPAPSRFPIASSVPPAEGPVYLGKPAAAKAPGAGGPSRPEMPVGAAREEPLPTTTPAAIKEAAGAPAPAPLAGQKPPADAAPGGGSGALSRPGFEKEEASQEERQRKQQEQLLQLERERVELEKLRQLRLQEELERERVELQRHREEEQLLVQRELQELQTIKHHVLQQQQEERQAQFALQREQLAQQRLQLEQIQQLQQQLQQQLEEQKQRQKAPFPAACEAPGRGPPLAAAELAQNGQYWPPLTHAAFIAMAGPEGLGQPREPVLHRGLPSSASDMSLQTEEQWEASRSGIKKRHSMPRLRDACELESGTEPCVVRRIADSSVQTDDEDGESRYLLSRRRRARRSADCSVQTDDEDSAEWEQPVRRRRSRLPRHSDSGSDSKHDATASSSSAAATVRAMSSVGIQTISDCSVQTEPDQLPRVSPAIHITAATDPKVEIVRYISAPEKTGRGESLACQTEPDGQAQGVAGPQLVGPTAISPYLPGIQIVTPGPLGRFEKKKPDPLEIGYQAHLPPESLSQLVSRQPPKSPQVKPVSPLSPHRLLDTSFASSLNKAHVSPQKHFTADSALRQQTLPRPMKTLQRSLSDPKPLSPTAEESAKERFSLYQHQGGLGSQVSALPPNSLVRKVKRTLPSPPPEEAHLPLAGQDQLYAASLLQRGLTGPTTVPATKASLLRELDRDLRLVEHESTKLRKKQAELDEEEKEIDAKLKYLELGITQRKESLAKDRGGRDYPPLRGLGEHRDYLSDSELNQLRLQGCTTPAGQFVDFPATAAAPATPSGPTAFQQPRFQPPAPQYSAGSGGPTQNGFPAHQAPTYPGPSTYPAPAFPPGASYPAEPGLPNQQAFRPTGHYAGQTPMPTTQSTLFPVPADSRAPLQKPRQTSLADLEQKVPTNYEVIDVVPMSSAPSETSYSGPAVSSGYEQGKVPEVPRAGDRGSVSQSPAPTYPSDSHYTSLEQNVPRNYVMIDDISELTKDSTSTAPDSQRLEPLGPGSSGRPGKEPGEPGVLDGPTLPCCYREEESEEDSYDPRGKGGHLRSMESNGRPASTHYYGDSDYRHGARVEKYGPGPMGPKHPSKSLAPAAISSKRSKHRKQGMEQKISKFSPIEEAKDVESDLASYPPPAVSSSLVSRGRKFQDEITYGLKKNVYEQQKYYGMSSRDAVEDDRIYGGSSRSRAPSAYSGEKLSSHDFSGWGKGYEREREAVERLQKAGPKPSSLSMAHSRVRPPMRSQASEEESPVSPLGRPRPAGGPLPPGGDTCPQFCSSHSMPDVQEHVKDGPRAHAYKREEGYILDDSHCVVSDSEAYHLGQEETDWFDKPRDARSDRFRHHGGHAVSSSSQKRGPARHSYHDYDEPPEEGLWPHDEGGPGRHASAKEHRHGDHGRHSGRHTGEEPGRRAAKPHARDLGRHEARPHSQPSSAPAMPKKGQPGYPSSAEYSQPSRASSAYHHASDSKKGSRQAHSGPAALQSKAEPQAQPQLQGRQAAPGPQQSQSPSSRQIPSGAASRQPQTQQQQQGLGLQPPQQALTQARLQQQSQPTTRGSAPAASQPAGKPQPGPSTATGPQPAGPPRAEQTNGSKGTAKAPQQGRAPQAQPTPGPGPAGVKAGARPGGTPGAPAGQPGADGESVFSKILPGGAAEQAGKLTEAVSAFGKKFSSFW

SEQ ID NO: 2438 - DNA, 15954 bp, Homo sapiens
cgagccgagctgggagatggcggcggcagcggcggcgccgagagtgtgagcaccgcccgggagccgccggcccgggcgcagcgcgaccccgaccccgcccgcccgcctgcccgccatgggcaacgaggtcagcctggagggcggcgctggcgacgggccgctgccgcccggcggcgccggccccggcccgggccccggccccggccccggcgcaggaaagccgccttcagcaccggccggtggcggacagctccccgcggcgggagcagcgcggtcgaccgcggtaccaccggtccctggccccggccccggccccggtcccggccctggcccgggcagcacttcccggagactggaccccaaggaacccctgggtaaccagagagcagcttccccaactccgaagcaggcttctgctaccactcctggccatgagagcccccgagagacaagggcacagggaccagcaggccaggaggctgatggtccccgcaggacgctgcaggtagacagcaggacacagagatcagggcggtccccctcagtgtcaccggacagaggcagcacccccacatcaccctactccgtccctcagatcgccccccttcccagcagcacgctgtgtcccatatgcaagacttcggacctcacgtcgacccccagccagccaaacttcaacacctgcacccagtgtcacaacaaggtctgcaaccagtgtgggttcaaccccaaccctcatctcacccaggtgaaggagtggctctgtctgaactgtcagatgcagagggctctgggaatggacatgaccactgcacctcgctccaagagccagcagcagctgcactccccagccctgtctcctgcccactccccggccaaacagcccctggggaagccagaccaagagagatctcggggcccaggaggaccacagcctgggtcccgccaggctgagacagccagggccacctcagtgccggggcctgcccaagcagctgcccctccagaggtggggagggtgtctcctcagccccctcaacccaccaagccttccacagctgagcccaggccacctgcaggagaggccccggccaaaagtgccaccgcagtgcccgctgggcttggtgccactgagcagacccaggagggcctcactggtaagctcttcggccttggcgcgtcactgctaacccaggcgagcaccctcatgtctgtgcagcccgaggctgacacccagggccagcctgcccccagcaaggggacacctaagatcgtcttcaatgatgccagcaaggaggctggcccaaaacccttgggctcagggcccgggcctgggccagcacctggagccaaaactgagcctggggctagaatgggtcctggatctggacctggagccctgccgaaaactgggggaacaaccagtccaaagcatggcagagcagaacatcaggcagcatcgaaggctgctgccaagccaaagaccatgccgaaggaaagggccatctgcccactgtgccaagccgagctcaacgtgggcagcaagagcccagccaactataacacatgcaccacctgcaggctccaggtgtgcaacctgtgtggcttcaacccaacaccccacctggtggagaaaacagagtggctctgtctgaactgccaaaccaagcggctactggagggcagcctaggagagccgacccccctgccgccgcccacctcacagcagccccctgtaggggcccctcaccgtgcatctggaacatcccctctgaagcagaaagggccacaggggctgggccagccttcaggccccctgcctgccaaggccagccctctatccaccaaggccagccctctgcccagcaaggccagcccccaggccaagcccctcagggcttctgaacccagcaagaccccaagcagtgtccaggaaaagaagacccgagtccccactaaagctgagcccatgccgaagccacctccagagactaccccaacccctgcgactcctaaagtaaagagtggggtgaggagggctgaacctgccacccctgtcgtcaaggctgttccagaagcccccaagggtggggaggcggaggacctggtgggcaagccttactctcaggatgcgtctcggagcccacagagcctcagtgacacaggctattcctctgacggcatctctagctcccagagtgagatcacaggagtcgtgcagcaggaggtggaacagctggacagtgcaggggtgacagggccacatccacccagcccctccgagatccacaaggtggggagcagcatgcggcctttgctgcaggcccagggcctggccccaagtgagcggagcaagccactctccagcggtactggcgaggagcagaagcagcggccccactccttgtccatcacgcctgaggcctttgactctgatgaggagctggaggatatcctggaggaagacgaagactctgctgagtggaggcgccggagagagcagcaggacactgccgagtcctcagacgactttggcagccaattgaggcacgactatgtggaggacagcagtgagggtggcctgtcccctcttccaccccagcccccagcccgggcagcagaactgactgatgaggatttcatgcgacggcagattctcgagatgagcgccgaggaagacaacctggaggaggatgacactgccacctccgggcgtggcctggccaaacatggcacccagaaaggtggccccagacccaggcctgagcctagccaagaaccagcagcactgcccaagaggcgcctgccccacaatgccaccacgggctatgaggagctgctccctgagggaggctcagcagaggctaccgatggcagtgggaccctgcagggtgggctccgtcgcttcaagaccattgagctcaacagcacgggaagttatggtcatgagttggacctgggccaaggcccagaccccagtctggaccgggagcctgagctggagatggagagcctaacgggctcccctgaggaccgctcccgtggtgagcactcctctacattgcctgcctccacacccagctacacctcgggcacctctcccacctctctgtcctccctagaggaggacagtgacagcagccccagccgcaggcagcgtctagaagaagcaaagcagcagcgcaaggcccggcaccgctcccacgggcccctgctacccaccatcgaggactcctcagaggaggaggagctgcgggaggaagaggagctgcttcgtgagcaagagaagatgcgggaggtggagcagcagcgcatccgcagcacggcccgcaagacccggcgggacaaggaagaactgcgggcccagcggaggcgagagcgctccaagacaccacccagtaacttgtcacccatcgaggatgcctccccgacggaggagctgaggcaggcggccgagatggaggagctacaccgctcctcctgctctgagtactcaccctcaccctcccttgactctgaggctgaggccttggatggtggccctagccggctttacaagtcaggcagtgagtacaacctgcccaccttcatgtccctctactcaccaaccgagacaccctccggcagctccaccactcccagttccggacggccgctcaagagcgctgaggaggcttatgaggagatgatgcgcaaagctgagctgctccagaggcagcaaggccaggcagcaggggcccggggaccccatggcggcccctctcagcccacaggcccccggggcctgggctccttcgaatatcaagacactacagaccgtgagtatggccaggctgctcagcctgccgcagagggcacgccagccagcctgggagcagccgtgtacgaagaaatccttcagacatcacagagcatagtccgcatgcggcaggcctcctcacgagacctggcttttgctgaggacaaaaagaaggagaagcagtttctaaatgctgagagtgcatacatggacccaatgaagcaaaatggtggcccccttacccctggtaccagtcccacccagctcgctgcccctgtgtccttctctacccccacctcctcagacagcagcgggggccgagttattcccgatgtccgtgtcactcagcattttgcaaaggagactcaggaccccctcaagctgcacagctctcctgcctcccccagctcagcctccaaggagataggcatgcccttttcccagggccctgggaccccagccaccacagctgtggctccttgtccagctgggctgccacgaggatatatgactccagcctccccagcaggctccgagcgtagtccttcaccatcttccacagcccacagctatggacacagcccaaccactgcaaactatgggtcccaaactgaggatctaccccaggcccccagtggccttgctgcagctggacgagctgctagagagaagcccttgagtgcgagtgacggtgagggtggcactcctcagccttcccgggcatattcctactttgcaagctccagcccacctctctccccgtcttccccctcagagagtcccacattctcccctggcaagatgggcccaagggccacagcagagttctctacacagacgccaagtccagcccctgcctcagacatgccacggagccctggtgcccccactccatcacctatggtagcccagggtacacaaacaccacatcgacccagcacgcctcgcctggtgtggcaggagtcctctcaagaggctccctttatggtcatcacgctggcatctgacgcctccagccagaccaggatggtacatgccagtgcctccacctccccgctctgctcacctactgaaacccagcccaccacccatggctacagccagacaacacctccgagtgtgtctcagctgcccccagagccacctgggccacctggctttccacgggtgcccagtgctggtgcagatgggcccctggcactatatggctggggtgccctccctgctgagaacatctccctgtgccggatctcctctgtccctgggacgtctagggttgagccaggccccaggacccctggcactgcagtggtagacctccgtacagctgtcaagcccactcccatcatcctcactgaccagggcatggacctcacctctcttgctgtggaagcgaggaagtatggtcttgccctggatccaatcccaggacggcagtcgaccgccgtgcagcccttggttatcaacctcaatgcccaggagcataccttccttgctactgccaccaccgtgagcatcaccatggcctcgtctgtgttcatggctcaacaaaagcagcctgtggtctatggagacccctaccagagccgccttgactttggccagggtgggggtagccctgtgtgcctggcccaggtcaaacaagtagagcaggctgtccagacagccccataccgaagtgggccccggggaagacccagggaggccaagtttgccagatataacctacccaaccaagtagctcctctggccagaagagacgttttgatcactcagatgggcaccgcccagagcattggcctcaagccaggcccagtgccagagccaggtgccgagccccaccgggccacccctgcagagctgcggtcacatgctctgccaggtgccaggaagccacacacagtggtggtgcagatgggagagggcacagcaggcactgtgaccacactgctcccagaggagcctgcgggtgccctggaccttaccgggatgaggcctgagagccagctggcatgctgtgacatggtctacaagctcccctttggcagcagctgcactggcaccttccacccggcccccagtgtgcctgagaagagcatggcagatgctgccccacctggccaaagcagcagccccttctatggtccccgggaccctgagcctcctgagcccccaacctaccgggcacagggggtggtggggcctgggccccatgaggagcagaggccctacccacaaggcctgcctggtaggctgtactcctccatgtctgacaccaatttggctgaggctggcctcaactaccatgcccagaggatcgggcagctcttccagggtcctggacgagactcggctatggacctcagctcactgaagcactcctacagcctgggctttgcggatggacgctacctagggcagggcttgcagtatggctcagtcacggacctgcgtcatcctacagaccttttggctcacccgcttcccatgcggcgctatagctcagtgtcgaacatctactcagaccacaggtacggcccacggggagatgcagttggcttccaggaggccagcctggcccagtacagtgccaccacagcccgtgaaatcagtcgcatgtgcgctgccctcaactccatggaccagtatggtgggcggcatggcagtggtggtggtggccctgaccttgtgcagtaccagccccagcacgggcccgggctcagtgctccacagagtctggttcccctcagacctggactccttggtaaccccacctttccagagggccacccaagtcctgggaacttggcccagtatgggcctgcagcaggccaaggaacagcagtcagacagctgctgccgtccacagccactgtacgtgcagctgatggcatgatctactcgactatcaataccccaattgctgcaacactgcccatcaccacccagcctgcctcagtcctgcggcccatggtgcgtggtggcatgtacaggccttacgcatctggtggaatcacagccgtgccactcaccagtctgacacgtgtgcccatgattgccccccgggtacctcttggacccacagggctgtaccgctatcctgcaccaagtagatttcccattgcttccagtgttccacctgcagaagggcctgtctatctggggaaacctgctgctgccaaggcccctggggctgggggcccttcaaggccagagatgccagtaggggctgcacgggaagagcctcttcccacaaccacccctgctgccatcaaggaggctgcaggagccccagctcctgccccactagctggccagaagccaccagcagatgctgctcctgggggtggcagtggggccctcagccggccagggttcgagaaagaggaagcatcacaggaggagaggcagcggaagcaacaggagcagctgctccagctagagcgggagcgggtggagttggagaagctgcgacaacttcggctgcaagaggagctagagcgggaacgtgtggagctgcagaggcaccgtgaggaggagcagctgctggtgcagcgggagttgcaggagctgcagaccatcaagcaccatgtgctgcagcagcagcaagaggaacgccaggctcaatttgcactgcagcgggaacagctagcgcagcagcgtctgcagctggagcagatccagcagctgcagcagcagctgcagcagcagctagaggagcagaagcagcggcagaaggctccctttcctgcagcctgtgaggcacctggccgagggcctcccctagcggctgctgagttggcccagaatggccagtattggcccccccttacacatgcagccttcattgccatggcagggcctgaaggacttgggcagcctcgtgagcctgtgctgcaccggggtctccccagctctgcctcagacatgtcactgcaaacggaggagcagtgggaggccagccgtagtggcatcaagaagcggcactccatgccacgcctgcgggatgcctgtgagctagagtctgggactgagccctgtgtggtcaggaggattgccgacagcagcgtgcagacagacgatgaggatggggagagccgctacctcttgagtcggcgacgccgggcacggcggagtgctgactgcagtgtgcagacggacgacgaagacagtgctgagtgggagcagccagtgcgccgccgcaggtctcgtcttccccgccactcagactcaggctctgacagcaagcacgatgccactgcctcatcatccagtgctgctgccactgtgagggccatgagcagcgtgggcatccagaccatcagtgactgctccgtgcagacggagcctgaccagctgcccagggtctctccagccatccacatcacagctgccaccgatcccaaggtggagatcgtcaggtacatatcggcgccagagaagactgggcgtggggagagcctggcctgccagacggagccagatgggcaggcccagggtgtagccgggccgcagcttgtagggccaactgccatcagcccctacctgcctggcatccagatcgtcaccccagggcctctgggcagatttgaaaaaaagaagccagatcccctggagattgggtaccaggcccacctgcctccggagtctctctcacagcttgtgagccgccagcctcccaagtcccctcaggtcctctactcaccagtctcacccctgtcccctcaccggctcctggacacctcctttgcttccagtgagaggctgaacaaagctcacgtgagtccccagaagcacttcacggctgacagcgctctccgccagcagacgctgcctcgccccatgaagaccctgcagcggtccctgtctgaccctaagcccctcagccccaccgccgaagagtctgccaaagagagattctccctctaccagcaccaggggggactgggtagccaggtgtcggcgttgccacccaacagcctggtccgcaaggtgaagcggacactgcccagcccccctccagaggaggctcaccttcccctggctggccaggcctccccacagctgtatgcagccagcctgctgcagcgagggctgacggggcccaccactgtccctgctaccaaggccagcctgctccgggagctggaccgggacctgcggctggtggagcatgagtccaccaaactgcgcaagaagcaggcagagctggatgaggaggagaaggagattgacgccaagctcaagtacctggagttgggtatcacacaacgcaaagagtctttggccaaagaccggggtggccgtgactacccacccttgcgtggtcttggcgagcatcgtgactacctatcggacagtgagctcaaccagctgcggctccagggctgcaccactcccgctggccagtttgtggacttccctgccactgccgctgctcctgccaccccctctggtcccactgccttccagcagccccgcttccagcctccagccccacagtattctgcaggcagtggtgggccaactcagaacggattcccagcccaccaggcccccacctaccctggccccagcacgtacccagctcctgcctttcctcctggtgccagttacccagctgagcctggcctgccaaaccagcaggctttccgccccacaggccactatgcaggccaaacacccatgccaaccacacagagcaccctttttccagtccccgctgatagccgtgccccactgcagaagccacgccagacatcgctagccgacttggagcagaaggtgcccaccaactatgaggtgatcgccagccccgttgtgcccatgtcttcagccccatctgaaaccagctacagtggcccagcagtgagcagcggctatgagcagggcaaggtccctgaggtgccccgggctggtgaccgtggcagtgtgagccagagcccagcccccacctacccctctgactcacactataccagtctggagcagaacgttcctcgaaactacgtaatgattgatgacatcagtgaactgaccaaggacagcacctctactgctcctgatagccaacggctggagcccctggggccaggcagcagtgggcgtccagggaaggagcctggagaaccaggtgtccttgacgggcccacactgccctgctgctatgccagaggagaagaggaatctgaggaggactcatacgatccccgcgggaagggtggccacctccggagcatggagagcaatggtcgaccagccagtacccactactatggtgacagtgactacaggcatggggctcgagtagagaagtatggtccagggcccatggggcccaagcatccctccaagagcctggctccagctgccatctcctcaaagcgcagcaagcaccggaagcagggcatggagcaaaagatatccaagttctcgcctattgaagaggccaaagacgtagagtcagacctggcgtcctaccccccacctgcagtcagcagcagcctggtctctcggggcaggaagttccaggatgaaatcacctatgggctcaagaagaacgtgtatgagcagcaaaaatactatgggatgtccagccgggacgcagtggaggacgaccgcatttatggcgggagcagccggtcccgggcaccttctgcatacagtggggagaagctgtccagccacgacttcagtggctggggcaaggggtacgaaagggaacgggaggctgtggagcgacttcaaaaagcgggccccaagccctcatccctaagtatggcccacagccgggtacgaccccccatgcggagccaggcctctgaagaggagagccccgtcagtcctttggggaggccccgccctgccggagggcccctccctcccggcggggatacctgcccacagttctgctccagccactccatgcctgatgtccaggaacatgtcaaggacggacctcgggcccacgcatataagcgtgaggagggctacatcctggatgattcccattgcgtggtttccgacagcgaagcgtatcacctgggccaggaggagacggactggtttgataagccccgggatgcccgctctgaccggttcaggcaccacgggggccatgcagtttcctcctcctcccagaagcgaggccctgccaggcacagctaccatgactacgatgaaccccctgaggagggcctgtggcctcatgatgagggtggcccaggccgccatgcctcagccaaggaacaccggcacggtgaccacgggcggcactcaggccgccacactggtgaggagccgggacggcgtgctgccaaaccacacgctcgggacctgggtcgccatgaggcccggccccactctcagcccagctctgctccagctatgccgaagaagggtcagcctgggtatcccagctctgctgagtactcacagccatcccgtgcttcatccgcataccatcatgcctctgacagcaagaagggctcccggcaagcccactccgggcccgctgcactgcagtcaaaggcagaaccccaggcgcagccgcagctgcaaggtcggcaggcagctccaggaccacagcagtcacagtcaccatcatccaggcaaataccctctggggcagcatcacgccagccacagacacagcagcagcagcaaggtcttgggctgcagcccccacagcaggctctgacacaggctcggctgcagcaacagagccagccaaccacccggggctcagcccctgctgccagccagcctgcagggaagcctcagccaggccccagcacagccacaggtcctcaaccagcaggaccgccacgggcagaacagacaaatggctctaaagggacagccaaagcaccgcaacaggggagggctcctcaggcccagccaacaccaggacctggacctgcaggtgtgaaggctggagccaggcctggaggaaccccaggggctcccgccggccagccaggtgccgatggggagagcgtgttctccaagatcctccctggcggggcagccgagcaagctggcaaactgacggaagctgtctctgcttttggcaaaaaattttcctcattctggtgaccatgcccagcatggctcttgaagaaatgaagagaggtatcattgctgtggaaaaatctctggagtcagaggcctgggcgcagctctggactctgcgtataacacatctacaatctggcaaacccttggcccaaagactcaccaggtgggacgtggcaggcaggcctcagttgaggacgtgatgttttctcacagcagctgcctgggtgaagcatctgctggacaagtcggaccactggccaggggacctttgattgtctttccagagatgctgctctctgcagggcaccaccttcaaggcacagcccttgttgggagggagaaccctctccagaaaccctgccaccatggtgtcttgccgtacttcccacagccgcctttttgcggcctggccggccaggcttcccgtgcgttatacacagagtttgggcacacactgccctccctccgagatgccagaagtttttccacagccttggagaggggctttgactgagggctgggggccctgggctccgtttccttcacattccagctggcccggatccctctgtggcacagggccctgcccgtcacatgccctctgggtgacatcggagcagacctccatgtggccaggggttgggagaactttacaaacattaggacctaacactgtctcatcgctgaaataagaggccatagcaccgaaaagcagcgtgggcgccggctgaggcttctcccagcccgtgggtggcagcgtgctagcacactgccaccatctcaaagccatccccctagccatcgtgagcatcccagcggcaccgccattgtctcaaccagccggctcctcgtctgtacacctggggatttcttttgatttcaagaacagccttaatcattccagtttgatttacgtgtatacctcataaacatttttcttttgtttctctctccccctttctctcttctcttggctcactcccttgcctctccccctccaccaccaccttgtgactgatggtttggtttcctctctgctctgcccctgctcagcacagggagaatgttgacttagaagcaatagggggcagcaggccaccaagagcacaaccccagggcgaggtctggggaggcctcccagcccgcctctgtttactgtgcaattccagtcgttcttaagccatcaccagtgggtgtactcagagcagaggggccaggacttctgccagccaagggaaaggcccagagccctgtgcgggggaatgtggcactgtctatccatccggtggactgggcagcattcctccccagggctcttcccttgggggcctcctttcatctggggcacagccacaagtctcatctctaacgttctatgcaatgaaatataaaccctcaatgacaactgttaatatttaataaattccatgttatgtataaggagttaattgcaaacatgcaattgagaaactggatagatacactcataaaacccccacccctccccaccccacccctgctcccattgtgtgtgtgaaattctcagtctgtggcatgtttgacctgtggcaggactcgctgctgccaggtgagtcaccgcctgtcctgcagtggagcatgcacagctcgcagcctctttgcacgatttcatccattttaaatgcttgaccctcttgcttggagttctttttgcctcagaacctctccttcaggagcacttctagctgacttctgcacaagctagtgaggacctgccagaattgttgcctgagcgtgccaggctgcagggcaggcagtaaaaggcccccacataccctgcagttttctctgtccaggacagcaggtaaaaaggaatccccagagcagacgcaatggtaggagcctgcacaggatgtgtgtgtatggacattctgaaggtttgctgtaggatatctgtctgtctgtcattttcccttcctaccccaaccctgagccagaggcatctgacagccctttcccagagggcaccacgcaagggcagagctgggcggcatccacagccagagaggcagaggcaagagcagagccaggctgtgcccgagggaccccagctcttgactgcacctgtttcatgcctctcctctgtggctaggaggctcaaaggactgtgagccaggagatctgggctggagctagggggtcaatggatgctcaggaagagctgggcctttggcacttgtggtgagaacagttgacagtggtcatctggaactgttcatataaacagtggcttcaagctaagtttcttgtgaagtttctcaatagcaaatcttacagaaggtcctgtgtgaccctctctgcatctgtccccaggacctatgctccctgctcacccccttctccaaagcccaagcgtcccgctgctcatcagcttttttaccattgagccaggagtgcggcaggcagtacctgcctgacccttcaaggcctgaccttcgtccagagtgctctggtttgcaccatgcatttctcaggggtccgcatttctcatgcttttctataagatctacacaccccttcagagagggctcctcgctcacctctggtagctatggatgggacaggaagctgccaacctttgtgttggacttaacacccttgcctttctgggacttggcctcaccccacccatggaatacctgcctcatcccaaagatcaggtatgggctgaatgcagccatctgagcaagggctgagggaagccatcatctaacacctctggccacccaggaccaggtctgtgtggggatgtgccttggagaccaaggcaatagtcctttccactacaggccaggggatgggacaagaagtagggaacaggcagggaaatgttaggaggtcagcctccagcaggcctagtctcaggctctaaagtactgacttttcagcaaatttcctttctggccaagccctctgagtttgaaattctgacatctgccactcctcatcccccactgtacccacaggatacatcatcgcccctctgtgaaggtggctggagcaggcctctggtccatggactgtccttcctggcccttgcatggatgcagttgtgactctggggacaatgcagccagaagctgagggaccagcacttggtgccttggaaagtagagagcaacagacacatctccaaatgggcaaggagtctctagcatgcagcccaggccttctccatacccctctccccagcatcatgagcaagggcattgcctcctctctctgctcacttcagggcccagtgcactcacttcacagtgacagccctcccctacaatccttgggcagagcatgtggtctgagggcccacagtgaaagaacagcagtggtggcaactatgccttgccttctggagcctgtagggagttttccaggcaggtcctttgccaggacagcatggtcctgccctgttgtcccgtctgctctcctcttacccacccccatgctgtaaatacttgtcatcatggactccaacagggttagagggacaggcctaatcaactgaaactcctcggagatgccatctctgtctccctgggtgccagcagccctgctgccatgtgcactggggtggcactggagagccatggcagtcgtgagatattgtatgtgtatgcacatgatcatgtgtgtatgtgcgtgcgtgcgtgtgtgtgtgtgtgtgtgtgtttctgcctcattcagtttctggggtcaaatcagctccttctctccaagtgcactaccctggagagtggtggccactcaataccttttcctctagctttcatgtcttgtttttgctttccccttcctcctccctctctccctttctttccttctctccttctttatttgaggggggaagagtgctgtacaaagtcaaacaaacaagtttacagttgtaagtgcaatgacccgagtcctccacatgaccttgtgaattgtgtgctgtccttctgtgctctgtgagaactcgtggtacttcagtgtccctccccctgtattgtgacaaggtaattctgtggtatcagaataaaaggacttgatataaacaa

SEQ ID NO: 2439 - protein, 3880 aa, Homo sapiens; identical to SEQ ID NO: 2437

SEQ ID NO: 2440 - DNA, 170602 bp, Mus musculus
  misc_feature (1)...(170602): n = A, C, G or T/U
gtagcagagacgctgcgggctccaacgacagtcacctggttcccgcattgctggtgggaccacaggtcgcagaggggcggacagatcagcgcaaggactggctgcaggagaaggtggctactcccaagagagaggagcagagcaaagcctggacaccacccccaacccctttcctgaagcagacagactgacagacaggcaaatagacagacaggagctcagcagcctgtggtgacatacagactctctagcagcgaagacctccaagcgtccggagcggtgacagtccaacagccgcagccacgcgttccccaccagcgctgtgcctgggcagcgcgaggacccctgcctccaagccaagggctccttttgctagcagttaaaataaatcgaccaaacaacaaaggcaagccacaaaccaaactgacccaaccaaagcattcactgagaaacaataattactcacaaaagccccaaacgaaatccagtcagtcaaggcacccgggacgctgggtcactccactgttccttcaggtaaagagccaagtcttccgacatgagcatcacaagccctttgtgtctggctgttggggctttctgcttctgctgccccctccccctttttttttctttctaccatctatctgtgctttccctttgacctgtttgtcgtttctgtgttgtttatcttgtttctatgtctcggcggaaggcatgggtggactctctttccctcaaagcaggcagaaattgaaatctgggaagggaattgaaagggacgatgctttctgtaacagaagtttccagtaattttatatgggttttatggtgccaagtttggacattctcttgtttcagttgaaaacttgtcactttcctcagttaccacagaggtcctgggtcccaagaggtcggagaagggagggagaggaggataattttttgctttattttttttaaatcttgaagtcatttccatgacagcctctggtgtaacgttatctgtctcgggtgataaatgtgatagtaggattggatctgtatcaggcaagtgttttaaaaagtttcttcggaagagaaattacatggcttagcatggatgtcacggatgtattaaattcaaagcttgatcaccttttacagacacagactaagactggagcctaagtcttaagaaaaaaaaaaagcaatgaggaaggtaatgtcatggcgggatgggaggtgtacggtgaggttgctagaaatggtccccctaagaacgtgttgcagatggagaccatcatttcgctctctgccttctcaaaggatgcagcttctgcaagctagaatgacagtctctagaatggaaatgaatctgtatttttttttcaaattttgctccaatgcagaataaatctaaactgtgcccaccctttcctcatctgccttggaacccaactctgcagtttactgctttaagtaagcagcaaagtagacagggcaggcagggaggcacttcttgtttcctttttttttttttttttgtaattctgtgaaaatcagagagcctttgatatgctcttcagcctgagtagaccctctctttcaggattatgttactatagggcttgatgtctgagtggcattttagctaatgtcattttcatgaaagacagtcatttggaaggcactagggctagttatgcttccttcaaatagcagagtgatcttaacatgagagaccctgtcttcggggttatgtagcccttcaaggtatgtacctgcttatgtctgattctcagtgtcctttgtcctcatcttcctttgctttctaatcgctttgactggcaggctatttttatatttctagagaatacatttagatgtctttttaaagtgatacatgtttccattctcaaagattgggaaaagatcatctcttgctatgctcgtctgtgctaatatgatttggtttctgtgtaaatttaaaggcattgctttagaccattgtattatacatgtcttagtttctcctttccgggtatgatttatgtcgtccgaatgacaaagtaactattcctctcggtgagtgcttatttaacagtactttggatgaggcatatttaaagaaacttaaacagctcctccggggaataccattaggtttcttggtgacttaatttcattcactatatggtgatttctttttgctggtaattcagttcagacccagacaagtgtgtgtgtgtgtgtgtgtgtgtgtgtgtgtgtgtgtgtgtgtgtgtgtgtgttttattagatttgcacattgccaatctctcagtgactgcttgtcatagatctcagttgagtgtggttacttgagaactgtagcaatcaccctgttagagcgtgctgcactgaggagttccttgcagtctgttttttaacgctgtttaatgaaggagtgggcatctcactctgcaatgaaaggagcccgagaacagacagagccctgtgctgctgtggagactgcagagcagaagggagtgggaaggtaaagcgggctgcagaggtggtcttttgaatcgggtccttatagcttatcgatggaaatcaatcggtttggatgagagaattctctctgaatagctggttagatgctccttcagcgtctttgctggttcttagaaagaagactcaataatttgagtttctgaaaacttagaggagatgctaactggggacttcctgtgtgtctactatttttaatataggctgtgagaatgttgggtaatgaatgcagatttaatttcaaattcctgaatcattgttctgctgtggcagatgggttggaccttatgaaacattctgagattcaaaaaaactaccaccagcttcagatatggtgataatctgaatttctgctgtgggaattttgggttgatttttctgtcataaacttgaaactttgcaccagagctgtgacaactaagggaatctggaggttttagatggacttggtgaaatagttgtgttattttctccctttaactttgagtgaaatgtccctcatttatctttctaaagagtgcatattttaaaatgtctctgaggtagcattgattacctttagaatgttatccttgggggccaaatatcttcacataatggcatgtaagatacatgaagccatatgtctgcattgctggcaccttcatggatcaccaatcttcaggtacaaggtgggaatgttcactcagaaaggtatcttgctcattttcgtattaacagcatgcaagcatcaggccactcccccaccccccacggtgaagctcattagaccaaacacttaagtagtttcaaaattaataagcataagagaatatgagcagcttatatgaagcggggagctaagtcatatcgttttgtatcaatgcctctctgagaactcaaaaagtcgatctggaaagtgaccaactttaaaatgaagtaaacacctaagaacaatgtttgcatggagatactgcaaaatctattgttgttgttgttgtttttgttcatttgtctttcaacatggtatttctggagggggaagccagccacattggctgttaatatttccctcattgctctgccttgctctagcttctcaagtctgagggcattcaggtctgaagcgcttctttttttttttttttttttaatctttggacaagataatgataagcttcatgagcagagcttgaagtgagtcagcttctgcagatagaaagtagccaggaaccaggcatggatatgatggagaattcttctagagtaaggagatagtttgaaatccagagggctggacactgaaatttcactatttgtttgccagtcagtgtcatttgaatctaatctctgataagactagataagaatggggcacctaaaactgtagcagacatggaaagccatttcgtcgggggtaagtactggcatcatttacctgggtcttgtatttaggaagctgtgactctcctggtcacggaagggacttggcttccacaacaagacagcaggttacccaggaggtctccagcatactttcaatgatgttgtatttgtaaaaatatccacttcttcccttaagacaaaggatctttgtatcttaagaaatgcttaatccagagattccatgtgtctgtgggttttgctttttaatattgttcactctaccacttcatattaaatatgaaaaccacatcttaaacactattatatgcctatgcttaaagattgtggaatgcaaaaaaatagagagaggcaacgcagtctagactgtgtatggctgaacatatttgtatttttgttcctatgttctgagtttcttttaagatatttttatatttttatctcttaaattcttaaaaatcatttttttcagtgcttggtctggtcttagattaatttggatcatgttgaattactgttgaccaccgatattgaagttttgactatgtttatttacatcacagacatctcatgtctgtaaagatccaatatgaagtgagatgttatataaatcaccgtgtactaagattgataaagaataaattccctaagtgtcaagccaatgcaacagtttttaatgttgacaagatggttatgctacgttcttctcccaatccccttatgtctagagatgttttcctagtacatcaaatgccttcctagcatcttgagtgtgtcgttgctggggcatatctgtgtgattttaaaaaaagagaacaaaaacaaggcaaaagtgagttgaagtaattgcacagaacaattgaagagttggtggaggacaaaaatgtgttggcttgactatatagtgtttactggctttctgcattcagactgggtccttagcttcatgctatgctgctgctgctgctgctgctcctcctcctcctttttctccattttctccttcttcttcttcttcttcttcttcttcttcttcttcttcttcttcttcttcttcttcttcttcttcttcttcttcttcttcttcttcttcttcttcttcctcctcctcctcttccccctcctcctagcctcctcctcctcctccttcttctctagctgccagcatagattccaacactgccagcaggtgggaagaatgttaaccactaacagtggtcacaatattggtgctttaaattccatctataaatttttcctatgagaatctctcctagcagtgtttgtaaccacaacttaatgcatatgacaatatggcaaggtatttatgttctgtataatcaaaatgagagatcaaatggctgttgcaacttattgaaatggtgatctcttactctagaagtctcattcaaagcatatattcataattattccccagacataagttcatatcacattttaaaatattaccatcactccttttacttaacaacagataatgattcactttttctccaggtaaggtgcaacacaaattgtctcttttataaacagaccttctagaatattctcaactttcacatgacttcaagatgatacatgcaatttttaaattaaaaataatttgggatgatatgcaaagtagtacagttgtgctaatgttaaaaatcaatagccccttacgtgacattagtttaaaggtaacaggaacggcatgcaaattttagttctactttaaaagaggagtcaagactttgaagaagacaacagtggcatcattttaaatttcaaaattttggcaatttttgtagaggtttacttggcatcgtggactacattttgatgcagaaacacataatctacggaagtatcaaatcatctctttatagctatttcctagagatcgagtcacgaagcttatctacctaatgagtctggattgatttcttcctcagtgactgcttcatccaagttagtgctggaatttctaataatctgcattcttttcttccaggtcactggttgcttgtttattatacactaaatacaggggatagatgcagaaatcatagaacaaacaaggaaggtgggtttctgttacttagcaaggtcccttcatattgcctaggtaacaaccctcaccctagaacaacccagcatataagatcttccagtgaaagggaaaataaattcattcatcctggcattttgatttatttggcataaagaatcgccataagggaggggctggagagatggctcactggctaagagcacttgctgttcttgcagagaatctgagatctcttcccagtagccacctggtggctcacaaccatccaatgacacgcatggtggacatgcatacatatgggcaaacactcataaacaaaacgtaaataaatttaatggtaatttagaacactgtggttggaatcaacatatgcaggctaaaatatccccatgtctttaaagtacaacatggaacatttaatttataaaaggttttctttctcccagtttaaataaattatcttttcaatagtacattaggtggtccagaaaccatccacacactcagcatttcaatgtgccttcagaggacttcctcaatgttacagcaacttagaaaactctagaaaattctagatatagaccactggatttaaagaaggaacaggttaactcattggcacccaaaggttagtcttgatcctttaattttttttatttgtatataaggagcacaactggaaaattaaatactgtcaaatgattcccatgtctctaaaagcacagacaaaattctcacaggacattatagcacttatttgtgggaaaacacagtgagtggcgttcttggcttgtgtcttgtttgtcgtgaagtgtaatttcagtaggaattccagttccgctgtgatgatgcaatgacatcatcagctgagaagaaaacaagtacaagcagatctaagtacgcaacagaatccaaaccttcacagcatttacgttagctacacaccacctctctaaagcaaatggtcaactgagtgttaaacaatgactgtagctgggcaatggtgcacatttattacttgaaaataaatctatgcagtttatcaccagagcatgactctataagccagtatggtacaaagtcaaaactggtgttgaattcccccaaatgaatcgtgagaattctgtgaggaaatggtcgggccaacgcggcacgctgtgctgcttcatgttgtttgtgttttatctattatacatttatttacctgtgctgcagtcagcaggatttttggaagccagaatctccacagcaaagagttgatctaatctgttgttgttgttgttgttttgggtttttttccaatcctggttttcaaatattccttaagaatgttctggaaacatccagcaaagcggtcttgatcgagcttccgaagcgtgctgtaaaaatcacgcttgccccagcatgtcatgcgtgctctaaggaactgtatgtttagtctcaccgttgctgctgtctccagggtctataaataacttcccgtcaggaactctcttcagcgtcaggacgttagagtgcagaaatgatgtgccagttcatgtgttacaaaacgtttaggcttagtgagatgagtcagcctgtgaaggtctctgcctccaagacggacaacctgagttcagtccctgggacctgcatgtggagtgagagaagtgactcctgcagggttagcttctgaaggccactcgagcatagtagcttgggaatacacatacacacacacacatacacacacacacacacaaacacacactcacacacatgcacacacacacactcatacactctcacacacacactcacacacatgcacacacacacacactcacacacacactcacacactcacacactcacacacacacacatacacacacacacacacactcactcacacaatactaagaagatgaatttaagcaattctaaacaaattatatatcttccagagcactggtataattatcctcctacaaatgatttttatatctgtgtggtcaaatgtgaggcagggagttagaagcaaaactattttgactttaagcagagtttgggattgaaagtaggattagaaccagaggagaggatgtgtacccagggagggtaggacctcatgtgacaagagcaagaaacagttaggggagaggaagggctgttcttgccaggaagtgtctgtggcctctctcagattctgtgaacaccatttgcatcgggctgaaagcttctgtgaagtcaagcctgtcttatgcaccagcaaacttcagttctccaccttctgacctccagaagtacagtgctgctcacctgagtggggatttggtctagatgtctggcctcttccccacagtaagtaactcaccatgggaccatagctcagtgaacctgtgcagtagtcccctgatcttaatactctgctagttatatgactagtcatttagctaactacttacttcttatgatctccatttagaaactgggaattgaccttccagcattaaaaatccctgacatggagtgtgacccactaaaatgaagtcttcatccttttatttagaagggttagacacagatttacttcattccataaataaaacacagttctcttagttattttattttaattttaatgtgtatgcttgatttgcctgtaagtatgtctctgtaggacctgcatgcctggtgcctgcagaggtcaaaagaaggtgtagtacatcccccgaaactgtgagcttccttccagttgggtacagggaattggaagcctacccaggtcctccagtagagcaaccagtgctctcaatctaacacaactccctttaggaaaaacaaacaaacaaataaacaaaaacaaaaaacaaaaaaatcccaaagcttaaaaaaaaacaactagagttcaataccttaattaataattgttttaaattaacaacaaatactttttctttatttttatttttatttttcaggctgagtcttggtatgtatcacaggctagcctagaattcatgattctcatgacttccagatgctgaaatcgtagacatgccactatgaccaactgccaaatataaatggcagctttggtatttaaaatcaatgagcagcttaattctttatgtctgggacttatcaaagaccaaggtagtgactaaatctcaagagtgctggttggaaaaagagcacagtgcttcctaaggccctttcttccatcagtacctaagggaagggatgtctgcctgcctaagagttctccaaacttattattggttcagaccactgcatttgtctcatttctaccatctaaaacagacagcccagttttcaaatctttgaacaggtgatggtcagaatagctccatgaaggaataacttttcaggagccaggtagggggagccactcaacaagagttcagacagtatgggagattaaaaaaaatttttttttctaacctaggacaaagagcaagcgtagagtttgggggtttccaagaagctcctgttattctaccagactccagcttcctgtctctcagagttctttggacagagcagtggagctggcctctgatcctgaagtttctgaggataattttgttcagtgagtcagcaccctggcttctgaggagtacaggctgaggaggactggatctgctgtcatgataagggttcccacttacttcccctagcaggaaacagagaaccacaagaggtcctcagtatagaagaatgtgggctgcatggagcagtaaatgcatgagataattgcattgtgctttctattataatatgaatatcttacgggtttttttttcccctggggaaataacaccatcagtttcagccaatgaacattctcaaaggcctgggggcatgctcacaaaccttaccttttacaagatttgctgggaaacaaataaaagaattacatgactaggtagttgcgtacaaaacgtgtggttgtgtgtgtgtgtgtgtgtgtgtgtgtgtgtgtgtgtgtgagagagagagagagagagagagagagagagagagagagtcaacaaaacacacttaccccaaaagttcaccccctcacatatttgtcatagtcttcagcagcttcagactagtatagtgattatttgtgattagtttttggtttttgtttgtttgtttgtttgtttgcttgcttttttcttttttgtttttgtttgtttgtttggttggttggttggttggttggttggttggtttttcgagacagggtttctctgtgtagccttggctgtcctggaactcactctgtagacgaggctggcttcaaactcagaaattcgcctgtctctgcctcccaagtactgggattaaaggcgtgcaccaccacacccagccttatttaatctaagtttactgaattaaaatttgacctttgttagtattgattagaactcatgtgcagagttcctacatgaatttgtaattgtatttccttcgtggactttcagttcacacacatgtgacagctgtctttctgaagaagaaaaaacagacacctttaatataacactgtaactacacttgagacttttcttttaccgtttcaaacaagtttctttccctatttcaggaagcaggtagcaactctgaggcaagcacaaggccccttccttgccagcctgcatcaacccaatgattccctgcctggaggaagttacagttaatactaggtcatcaaagtgaggcaaaagccagcactcggttttgaattcttggctcaaggtgctggagacatctggcctttcccggatctgtgcttatgaagggattacatctgacttaaggggggagggagggtcaatccaaggactaagcaagtgggtaaccaggtaggaaggcaggctcagaggaagagaacagagagctctagcccaccagggcttcctcaggcaagaccactttccctaaactatggaagttggtatctccttgtctcttaggaagatgatagagtaaacctggcttaaatgccaagggatgggacgtaattctcccccccaccctccaggccactgatgactgacttactctcagctgtaagggtgattttaagatagataaatacatcgatgacaaatagatacacgtgtgatagatagatggtcacatagatacatagttgacagatataaatgaccacacacacacacacacacacacacacgcacgcacgcacacacgcgcgcgcacacgcaagcatacaagcacgcaggcaggcaggcagacagacagacagacagacagacagacagatatgtgagcttgctgtctgaggttaaaaacaagtggaattagatacagttctgtaggaatcccttagttgctagggagtggtctaacctgcaggttacctgccaagcacagcaattgcatcagataattacattgtattttgtaacataatgtgtatgttggacattccttctttcatgtttgtgtgcatgtgttcgcacatgtgtgtggtgaagcagagactgacatttaggatatcttattttttgagacagggtctctctctctctctctctctctctctctctctctctctctctctctctctctctctctctgcctggcactccaagattcaacaacactggctgaccatccagctattcaagcctcccagtccatctaatcaagcaatgtggttccaggtccacggcagcaagcacagctttttattggcatctgaggacctcagacttatctctaaacatctcatgaaggttctcatgcttcatagcaagttaccagctgatccattggcccagctacccccagacccccttcttttatttaaatgcaattcttcccgttgaaagaaaacttgcaagcaaaagcgcaccttgtgaaataattatctgaataggactttaaggtgaggctttattgactccaggctcataggatcaatggaaggtaatgaccgaggatgctgaaaccacacacaccaatgtgagtctcaggatgtcctcactggaacaggaatctgggttcattgccccagcaaagttcatggccaagtaccttatcccacaatattacacttggtggggggaggagaaaactatttaagggggtacctataaagcaatccatgatttctacggtctcttttagtttataatttccatgattcaacgacacacttgtggtaacaaccgtgggtctgttttaatactgtattattcatgaatttttattatagattttcccttcaggcttgagagcaagcacgcggctgggaaatagagggagcgtgtagaccgatgctctaatcaagactattcagcaaagaaactgggcgggggtgatgtcccaagaaccagagtcagactccactctgccaggcccaggttcattccttaagtgttctgcattggctcccttcatttctaaagatggactgcagtaagaactaactgccaactgttcttcccagcgatgggtttaatttttctcccttgtcttcctcatatcttcatgctttgcctgggtgctttcaccatacctagcacagtcacactgcacagggtagcagagaagccgagagagagagagagagagagacagagagagagagagagacagagagagagagatctgggtgagaatgattcagaattcctgacccacacagaattccacacagcatttcattacctgctaacctgactcatccgaggtgagaccatgtctttttgctaatttacaaaggaagttgcccaggcttccttacaggttcatcctatgacaacactctagtaccctctcaggggtgacttggatttctatctaaagaaccagaaattatctcaaatgaaacacagtccgtagattagtgacttgtgccatggcagagaaaacccatgaatctatctggcacatgtcatttgcaaaatcaaattcatctcttggatatagccagacaagggagctctaaagtaatatatattttcctaaaatcacgagaaaacatcacctcattgtgttagcctcgctgtgcaagtagaaggtctgatgttttacgatccgaagccatggcttgtttcactggtggttgattagagctttgggtctcagcaaggaccagctgctttgctggttttgccatggtatgcgcagtttggagagccatccctggacttgcagatctgtgtctggtgatgtatttttaatgtgtagacatgaacttacatctagaatatggaatcaacagaaagcccatgaagttggggaagaatactggggaagacagaaaaagaaaaagaacgcattttctttttctgaagtgattaggggagctacctgtggtcatttgtagtggcaaccaccctcacttctgcatcgactagttcattagtactgcttgttctgctccatgggaacggcttaccttttatgctctgaattaccttgttcctccagtacataaccaatgcggagaaccaaaacctctgtaggctgtttaaatgcttgctaaggccacagggacaaagatgagtaataagtaaaattctctctctctctctctctctctctctctctctctctctctctctctctctctctccctccctctctctctctctctctctctctctctctctctctctccctttctctctctctctctctctctctctctctctctctgtgtgtgtgtgtgtgtgtgtgtgtgtgtctgtgtgtctgtgtgtgtctgtgtgtgtctgtgtgtgtctgtgtgtgtctgtgtgtggtgtccaagctgccctgccttctggttgggatcacacaatgctagtgtctctggtgtgatatattcccccctctagagaaataagacaaaagactgtttcgttcattcaatgatttgtctttgtgatagaaactatactgtattatgtaattgttatttaaaaaaataaaacccacaaacacttaagtgatatagtctagaaaggagacattgacaatcccagagtcaaggaagattatgtaatggaatcctggtggggaaagaaggcataggaagcaggtatagatgggtggtcttttccagtgggcgtggctgttgccacgggcctgtgtactgtcttggaccactgctcccagttttatctgtgctactgccatggttcccctgaggtcatggacaggtagtctcagctcctctttctcacctgcccaagttggccatgggaagcttggggtgtccttaatgagtctcgcatataaaaactccccatgtaattagaaacacaacctccacccttgttttattttcatgtttttccctttcactgactgactgtgaaaagaagccactttgtagctgcacttgcagagcttgttcaaggccacttttgattccatcccatcatcacacaaaggagaaggaaaaaagaaaaaccctgaaagacgggaggactcggagagcgatagcgtgttggtttgttgttttaaatattataacattatagtttgagaatgctataagcttatctgtctgtagataacctaaaaaggacactgaaatgaacttagggagtggccagagtcttgcttttgaagagggctagcaatacatattatataattgcaaaataataataataataataataataataataataataataataataaaggccaaagaaacaggctccagcactacacatttcaacttaaccatacagattaactggacccaggctgctggtttagggacccaacagtttgtgcttaagaacaaacaattgcccacacaaggaggatttatagaaaaatattaactcttcagggaaaaatgagcaaatactgaaaaaaaatgattttgtagatgtgtattaagtactgagtaaaattgaaagaaaaacgaccttttcggtttttgtccctagaaggttctcaagcttcggactctcaagcccccgctgtaccaatttttggttctttgaggtggaagcaaaagtcttcgggtgtacattctaagcaatccctctctccagttggagaaaagtgctggaccgttcccatctgacctgccttccgtcccctgcagaactggcattaacaggtggaggtaattgattttaacccactgccagcatggatggatgcattttcttgacagtgggcgtgaagttgcccacttcagattaccactttctcctggcattatcctccagaacaagtagatgagaattagccagcctggtcccctgtcaccaaccggtcccctagcacctgggatgcatatgtgtgtgtgtgtgctgggcatcggccttctgcctgtctttggtacggggtgacagttactctgcagatttggcacagggtggcggttgctccgcagatgttcaggatcgatgtggtgcttctctctctcctcctccaaccctcaggagtcagtttctcagacaaaggaagtggtgaggccaaacagaaggtgcagtgtgaccctgaaatagaagttaagtataagataggtccaataaacccgtttatcaagcatccatgaaaggcagtgggctttattaaaatattctaatagggaaatttagaggcagtgattaatttttgctaatgagatgttaaatcttatttcttgacctgaagcaaaggaacaacaagtaatcttccttatttttctcacttagataagccgaagaaatacagaactgtagaaatattcattaagggtaaagagatttattttctctcaatatattttagaagatctagagaaagcacattgcttcatggtttttcgtttgtttggttgggtttttggcatttgcatttgcctccttcatcatgggtattgggtaactctactcatgtaagtaccaacccaataccaggaggtcactttaattttaaagaaactctttctgaagagagaagagaaaaatcaacaaatatgcctacactgctaaatatatgtatttctatgttgatatatacacatgcatatttaaatatataaactgcatataaactaataagtagaatttatttatatacctgtataaatttgggccctcattctattataaacatattaatctctgctattgtagggcctgtgacagagtgagccaggctcactgattttctattcccttaagcatatggttacagagcagaatcaggaaggggaaagaatttgcatggttctctggttccaaacccttgcccccagtgaagtagaaaaacaaatagagggtaaagagtttcaaaatgcagcttaaggatatatatacatgcattttttatttcatatctccacccaagggaccaataagaatgcccttccctgtcttttatgctcactggtgacccagaggtcatatgtgagcatctgtgagctatgcgcttccttaagtgagtcctagtacaatggaaccacatgtgcttcttcatgctatctccaggggaagcctcagactgtagcactttatcttccgtcacactcaggagagttctcgccataagcatttgttctcaaacctgcacaggctctggccaaacaggaagggtttcataaaatacagagtgttctatctcagtagtttgggtgagactcagatctgaatttctaacaagatcccaaatgatgccagagttagtggtccaggaatcacaagttgagaaccagttattgaaaaacctaggctttcttcacagaatgcagtttgtataaccactggatgaccataatttcatgggctgaaaaaaattaaagaagtgatataaaatcctcagaaacagaccagcttctggctgagcatggcagctcgtgcctacagtcccagaggcctttaaaagacaccttccaaagaagctagttcccttctgaaattactgcagtgtttgaagccactggggcccctcgaagttccttgagggtcagggcttccccaaaggtttgaagtccattgtaaccaaagctgtaattatgtaatgtggacacacaactcctgggaggatgagtgcttttttctttctctgtgaagggcaggcagtggctaagacatgcacagagataaccaggtgagatggggacccatggctcctgttttcagatgtggaaactgaggcacagaggttgcctgctgagtcagaggtggggttaggcttccagtcctggatgcctagctcaaaatttgagactaaaacacaacactaaactttctcacgttgaggtttggctctctctgcattttcttctgtgatgcaagcctctatcctccttaatgctccctcctagttcacaggaggtccatgagatctgggggcacctgcaagccactgtccagagctgatctgttgaggtgccagggagagtttttagatggtcttatttgaacctgtcacagtggaagctgttgggccaggtgggtctgtctgcctgtgtacccacctatgtggtcagagctacagctgtggcagaaggaaacacctggtaacacaggaaggggagggaggggctcctgggtggatgtcctgggatgctctcctcttgtataaccagcagggccccctctgccatccacagcagatgcttcatgacggagtaaagagtgcgttctagaagaggctgggcaagggacccgctggtgacctggtgaggctgcttctcccattcacatccggtaatcagacaggacctaaaggcataggacaagaaggcccagcccttttctctttctctaacatgtctggtggagcagctgagtgaaaatgaggctgctatccagatgttagaattagagacttttctttaggctcaaagcaaaccagtggtttttcttatactccagtgaggcccctacagaagtctgctcctcagagatagctttggtaaactcagtcctcagaaatggctacggactgaggtcagctccaccttagagtctaactctttaaagaagtctccaagctcaatgttcaaggtaagacaccagtcaaccttagaaaagcattccctaaacacagttgtatttggggttagaggctacactggcatttggtagtaacaggtatttgtgactgaaaggtttcttattgttagcccagctacaggggacacagacatgttttaaggggtgtaggagagactgtgccaagaatggaaagcaattgtgtgtttctggatataggttgcagaaatgacgctggttaataagacaagatgcatttcgatgtggcttggtatctttctgcagtaagtaacaatggctattgtgtgtggctattgcatttattttgagtgaacacaacccaagtgcatacttggaagctggtagaaagcaatagacggagcatgggcttccagacctgcttggatgatgccagtttcatttgaccttggacaaggactcattcattttaatcccaacaattctttcttttctctcccttctctacctccatcttccccttaacttcctcctccctatttcccactccattccccatgctccccatacataattcttttcttcctacccctttctttgtcaaaaattgcattcattcgttcatcattcattagttcatttaccaattaatttatttgtgctatgatgtacttgtggaagtcaaaagacactttcaggactcaggtctatccttcccccgtggggttcctgaggatagaacttgggtcatcaggcttggcagcaagcacctttgtccactgagtcatctgttcagcacccccctctctttttgttgttgttatttttactttattcttttcttcctccttttccatttcccttctttattatgtataagtaagttgtaccaagcacgaaaacattatatataaaatgatcctttgggcacttggcccatgaaatataaatgaagccacaatagctgttatttttatgagacgtgtaaatgcttctgtgttggaggtgaatcaaatagaatagctatggggggttgtggttaccactctctaaacaccagctttgtggttcgctttgccacagatctacagtatcatttcttcccaagtaggaaaaatggacgcaagtttcttttccttacatcagtgagtctggtgaagaatagaagtgacctatttgagtttaattccaggatttccatagaggtaatcacacatctatctatgatggagggcatgctttaaggtggctgcctctaagacaaggtcattttggctctagttgtgtggctggtatgctctgtgctgactttcaggactctgcagatgttcgtcacagtgtacgtgctgagaaaatacccagccaatcccctgcagctgggaagagcaattagcagctccctgaattagggtcttgtttacgatgttgcccaagataatcatctgtttgttttaactaagatgctctgtcctcatcagccgcatcagtcctcatattttaatgataaggcctttgaatcttacaatagtgtttggatttcatggcgggatccccggcatagttctcattttctcttgatgactctgggaatcagcacacaatgtgcctatatatcttccatcacttcttcaactcaaacagaaagggaaatgcctgagatctgcagcgtaaacttttactggatacatccgttttaaggaatatcttatttcatttggaattccagcatgcacacacacacacacacacacaaatcaaaaccttatgactgtagtcttagcacaaataacatactctaacacactctgtagtcaggctcactctatagccatctgaggtttctatttatttcatttaaaaaatatcccactggggatgcagctcggtctgtacaggacatgtaggaagctctgggatctatcccccgaactctgtaaccatggtgtgccaataccaggacttgggaggcagaggtaggagggaggatcagatattcaagatcagcctcagatttaaggctatgtggggtatgtaaaactctcttttaaaaaaaagtgatggataaagaaaagatgggggtaaattaaaaagtaattaggtagcagtcaatcttcatgacttgttaacaggccactgaaacacagtgacctacacagggacttactccatggtcccctcttttctcagagtttgcacaacagggctcatctaggctgcaggtgggattgattgttttctcagtgagtacacacctacctgtctctgaaggtgaaagtcattcatagtcacaacaagtatttattgatgagacttataacttacttgggggaaacttgggtataagccagtagctgacagatgcccactcatgcctgcaaaggatttcttgtatgagttagtccacatatacctaacagatatttccggtttcaggttctccattcgccagtcacagcacacaagctcggttcaatttttctttaaaatccatcttggactatgacagtaaatagttaaatacaaatagccaatatgtaaacaaatacaaacccttaatgtttagaaacattaatttcctgtgagagtcacactcttttcactctggcactcagaggtcagaaagcatgtctactgacattgggaagcctgtgacctgcctgacctagggaccctgcctttccctgaggtgaagtggagctgtgtagtttggtaggagcattagcctgaacccagcgtatgacagaggatgtctcctgactcactctgtgggttagcacgggttcagagcaggtcgtctgtcacagtgagaaagatttgttaagagattcgagaaacgggagactggagttggataggatacagttctacctggtgcaggggctcagtgccttcccccatagccttgtaccctccaggagcagctcaggcaggacactcttagggtcacagagatgcctgcgtaagactcactcacttaaggtaataaaacaagattgttttatgacaggtgtgtcttgctccatctactggcacaggcaagcatgagactcattgccagggacagagcagtgtcctgctaggacagacctcctcagcgtcattctcctggactcagactcgggaacttccttcctaaacacagccttttcagagatattttcaaaggagcccatgagacatcactcttaagtgaatcccaaagattctgtgaaacctttggactgaaatagtggttctcattttctccaggggtcacgggagactagtcgattcacacctctgtcaaaggagcatggtgacatgggtaacaggtggcaggtcaccagaggacttcctgctcttggctttaccttgctggtggcgtagcctttcaggaagccagccacctgagctctgactacttctctcccacagaccttaagtttgtgccctagatttgacctttttctcttttaagccacctcagatattgaatgcagcctgtactctcacctcaggatggctgcaccatctccatgtcaagacctagggcaggagatccatgcttggactctggtgtcagaggcagaagggtggcagccacagtgggtgataacaagttacagcgttctcagattctaattcctggtgggattccaaaagagaatgtctaacccctgactaaggatgctgaataacagttactattcataatattggatgtaagagggatattgtatttgttatttatttgtttctttatttatttgaatcatgggttagtctgtttttcttgaatgctaggaactatgtgataaggatttatttagaattatttctaaattgaaaaacaaatagaaattgaaaaacaaattacttagcaaacttgtgcaattatttgaagctgattgcaattaaaaaaaggcacggttttattttacgtgtgtaagtattttgcatacatgtatggattcgctatgtgtgtgcctgacacatggagaggccaatagaggacattagattctcagaactggggttatagtgtcatgagctgccttgtgggtgttaagaattaaacccagtgattagccactaagccaactcccctgctccccagtgcacatttctcaaagcaagtgtgcctcttacaactgtagaacactcactaggagctgatttcacaatcccttttcattgctccacactttattggggtctatttgcatatgtgccgatgtatacatgcaccgcctagacagtgaaagccaggctctcctcaattcagctgaaatacagatacaaaccttcccagccttgtaaaacagcaaatactgcctccagcttgacacttttctgtaagttctttgccgtgttcaggatgatcttcactgaactgtactgatgagcaagaggacctttggtgctaaaatttcattgttcctagggatagccaaaaagagaaggggagtagtaaatgtggaaacacaaagagaagcagagaaagagaatcaggtccttggcaacaatgccatggagttcagcactcagcacttcagcacccagggtcatgacatagtggatgctattcgagctacctagaccattctcttggggaattctgggatggttttgtgcatattttttatggaatggtggaacttgtaaatctaagattaatggaacattaatctctaatgatccattacaaatttttaaattcaacagtattcaactttttgattttgatacccggcttcttcctgctgatgataacacatctctcaggaaaaagggcatcacaggtttagtacttttgaatgtatcatcagttgggaaaggtgtttggctagaccagagtagaatagaaagctaaaggttgaaagagaataaatgagatgattctgtaagccaatgagcatttagagcagcagttctctatgtgtaggtctcgacccctttggcaaacatctatctccaaaatatttgcatcataatgcataacagtagcaaactgaaaataattttatggttgggagtcactccaacaggcaggaactgtatcaaagggtcacagccttaggaaggttgagacccactgacttagagtattgatgtttcatcttaaatgctaatttgcctttaatcccagcacttgggaggcagaggcaggcagatttccgagtttgaggccaggctggtctacagagtgagttctaggacagccagggctacacagattaaccctgactcgaaaaagcaaaataaaaagaagaagaaggagaaggagaaggagaaggagaaggagaaggagaaggagaaggagaaggagaaggagaaggagaaggagaaggagaaggagaaggagaagnnnnnnnnnnnnnnnnnnnnggagaaggggaaggggaagaagaagaggaagaagaagaatcatcatctatcacctggggagatggagatgccagttttgggtgtaccagtgagaacatttattagaaaggcttagcagaagaacaaaggctgtcctgaatgtaggtgataccatcccatgaactgtgaggctcagaatcaataaaaacagtaacacattagagaactagctgacttctggcattcacctctctctgcttcctgggcagccacgttgaaaactgagtaaggttgccacattctctctgctgtgaagaactgggctcaccagcactgtgagctgaaatattcctttcttcctattgtgttgggctgcttgcattgaatcttctggtcacagtgataaaattaactaacacacagagctccacaggcactaacttatatgtcatccttatgccttcccattatgtaccatatggaataataggtacttgtgattcggaactggaggtgtgatttttgagataccaaaaaggagtgggatttcaatttgtaattagtaaattaaatcccctctgaaagttaacatgaagacaaaacaaaaatcagaatgacttcccacatagaggtaaggattcacaccattagaggaaatcaactttttttttttaagtgttcccttgttagcttgtttaaaactaaatatatggtttcatgggaatcaataagcagaagtcatgagagtcaaccaggagcatctgttggtcccgttggttccttacagataccaaacaattcccgggctttacaattactgaccagtctcaggagggctatgttgcgcgagcataggtaggttctctggagcaagttcggagtcagggtttagtgtgcagttatttagtaggaaacattctggggacaaacaccattgaggagctgaggtgagagcagcctgggaagagacaaaggataagctgtggatagttaatacaaaaaaaatggcctcttccaggcccacaggatgatacagagctacaagggcctctggactgtggattcctggtctttgcttagtccttactagactcgctatttttctcattgctatgacaaaatgtctgaggaaagtgacttaaggattcagagcagttcactgtttgagggcgtggtccatccgggcaggggaagcacagtagagggagcaggaggcagctgatgtcactgcatccttaggatacagagacagaggggtgctcagcatcctagtctgcgttttattcagggcaagactccatcccctgaggtagaaccactaacattcaggatgggtcttcccaactcaggtcaagctttctggaagcaccctcacagacacactcagtgctgtgcatcctaatcaattctaaatccatcaagctggcaaggaagggaaaagatggcaggaggtgagctgactcagcatttgagaggctctttcagctggcacgagtcagggctctgcagggggttcaggaaagtgtctgcccttcaagcctgaggctgggcattccatcctgatcccccagaaccaagagggcaggtggcatggtgctatgcagccctgggcagatggcgagagacagatcactggccagccggcatggcttgattagcaagctccaggccaatcagagaacttgtcttaaaacacaaattgaacagaacctgaagggtgaactcaaggttgacctctgacctccacatatgcatacacacctgcacgtgtacaaacaagcacccacgtacatgtttgcagtctctccctcccccgcctctctctctctcacacacacacacacacacacacacacacacacacacaagaacatacaccagtacatgagcacacctctaggaccacttgttctacaagggagatgtgtgtctataacctgaattccacaccaggtactattctgtgaaggctgagcacaagggtatctcaacccagtgctaaagagcgcttcctttacatcatgaccggggagaaaagccttgactggagtccagcaagttaccagcgtacctgtctgtgagaggtttgtaagcacctcacactgcccctgggcatactcactcacttccggatcagcgtctcccacctgacctgcaagtgagcaggccagtgtgtgtgtgtgtgtgtgtgtgtgtgtgtgtgtgtgtgtgtgtgtgtgtgtgtgtgtgtaactataatttactcccaaagatgaaattttagatatcatcatttttattatgaaaaatgtgtcagcacttgcacaaaacaggatcccgtgttttgagcctccatgtgcatagaagagtgtcagtattttgcctttttccattctagacctatcatcaacagcgccaagcatagccactcgcgttgctgggtggaccaggagggagggttgtggtttcagcgcatggagagagttgccagtggctgaaatcaggcctgttttttagtcgccttaactgactaagagtaaaggtatcggggccatatttctgagaagtggggagtccactgtgcagccttgggcagggcgagctgtccacttttgtttccaaggttcggattctacagaaacccaaggacccggatctgacactgacactcaaggctccctcggagtcctgtggcctcaaaatatcatgctctgcgtcctaggctactcgaaggcacagaacatccaacgtgcttgtttcatttcgtccatctgtgttgtctgtgcacgcagtagcatatgcacatacgtgtattgtgtgagtgaaggccacagacaaccttgcagatccttcctaggaaactgtcagcctttttcttaggacagtgattctcacttacccagaactccgtgactagaggagacttcctggttatggagtctgaagcatcttcaagtctttacctatgcagcagtgatattacaagcatgtgttgccatgcctacctttttaatatgaatactagggatgaatgtgggtccccaccatttggagtcatacattttaccagctgaactatgttttcccttggtgtgtgtgtgtgtttgtgtgtgtgtgtgtgtgtgtgtgtgtgtgtgtgtgtgtgtgatgctgtctagtagaggggcctcctttcagaagtcagttagtctaaaagtgacttgaacaaccccctgccccccacctcatgtttctggcagattttcatcccagcataaaaccaaaatgaaaacctctgcttggaataggagtatgttacagaaagcctgcagggaatgctgaagtacgtttggaatctgacataaaccctgccacttgagcacacagttctgatgccccacaattcaaatccacagatgattgccggaagtgttgaagatgacctcccgtgcccagctctgtcctcatcgggaaaggcccaggcatgcctctgagtgaactggcagctgctgtgcctctgcaaagggagcaggctgctgctggttggttggctctggagcaggtggcatggggtgggggcgaggctacagcatttcctctttaaggtggtagccagctgcttccttggtcatgtgccccagtgagtgcctgcaggaggcagggggccaggagtatagctgatacagcagccagctccctgcagctgctgctctgttctttgagcgaagcatctccaggcctctgtgtggcctgagctggcatttagggaggggcagcagaggagtgaatactctgacttaagtgacttaacccagctgctgtgctccccgtccttgtgtgtgtgtttgtgtgtgagtgtgtgtgtgtgtgtgtagcataactgaagtgacacttctcaaaattcaaattcctgagaagtttacaacagcaagaaacagaggccaatcttaaagaagcactttgtaaggagaagggcgagccttccctcctatcccaggacgcatgagttcagcacacacagagcttagcttctgtctgtccatctctgtacacacagaagcagcctggagagaagctgggccccggggcatgccaaggcaggtgaggagagactggagcagaactttttggagaccattgctttcttctacctttaggtgagttcggaaaatcaaacccaggttgccaggcttgtaggacaagcacctttagatgctgatctcatctctatggccaacaccattggtttttgaggcagagtttgctctgtactttatttgatatgggactcagaaagtaatttaggggcaaagataacatgatcacccagcttctgctgccaagggcatgtgtaaccccaaacttgttttggtttttgttgttcttttgttttgtttgaaatgtagtcattgatataggactcaaaggaacttctatcccagcaataataggaagaaacctgatatggaagaagctcttaggcgaatgtgttaatgagagtatttttttcctagaaaaatcagtgattggttctcaaccttcctaaggctgggaaaccttcagttcttcatcctgtagtgacccccaaccacaaaattattttcattgctacgtcataactgtaactgtggtaccattatgaatcgtagtgtaaatgtctgtgttttacaatgggcataggctacacctgtgaaaggataactagagtcccagaccactgctctagccaaagcatgatgggaaaaggggagagatccttgggccaacactaacatccagagaagctggcttgtgcaaatcatatgaaggagccaggccgttttgtatatctaatattttaaatcatttaaccacagcacacataattaagttgcattatggcatttttaaaacaaaacaagctttcgttaatgcttctccccaccccttctctcccagactccgcctcctttgtacctctctgttcttccctactctcctttctactccgtgtcacgtgtgtcccattacccaaccctccacaagtcctcaacacctttcctttttaaagtctcatgctcttacccccagcgttcgggctgcatcacactctgcctcatttgcatatatacaaataagccttctgtgccactgtcctcaggttgctggagtgcttctaggtcacgtggttgggattttcctcatgtatgatacaaccgattagtcggcaagtgtgtccttagagatggcatgcctctgccctgcacctggtgggctttgtctctgtgatagggacagggacatggaccagcattccgacattccaatgggtgcattccatacattgtgaatgagcgagggctttactgtagtgactgataaactgcatgaaggacaggagaacctgttctgtcttttgtctcatttagggtctgtgtccacttcaataaagatagagtaaccctgtcaggtcaaattatgaggacttatattaatatatagcatataatatatcatacattgatatgttaattatattatatattgtacactatatattaatgtatatagaatatacatattatacaatagtatgtaatatatacacatatgtgtgtacatgtgtgctaacgagcacctgtgcattgtgtgtcaagatgcatatgaaggtcagaggatttgtagtctttagtcctctcctctagatcttcagtcttagctacaagttcccttacctactgagccatctcactgcctctaaaaccttgcttttagaactaaaaaactaaagtaaatggcatggtccatgcgaaaaattgtatttacttatgtctataaaactctatggactcaaaaatacaagcttagtcagacgtacacatatttccccgactcagccatacttaagacagcttttgacatcatggtatagagttgatttctgtgatatctcgtttggagagaaaggatcaccttaaacatttgagattgcactctgtcttttgttggagaaacaagagatgaatcttttgggtgactatccacaagtccacaggcccatgccccagtcagaagggctgctgtcgagggagagatgtttactcagtccaacccaggtctatggaatcaatacaacttgaaggaccttctggaggctgaattctagtcccgtctgtgatgtctactcccaccaaagattggcttcgaatggttacaggtgtcacatgccactatgggctctgctagaaacttggttttcatctgtgtcttacagaaggaagtaagcttaaaaaaatcatcaagtctttggcttagcccactccaattagcagtcattcttggctcagtctccagtgtacttgcattgttctgactttaatatttattccaagcacaaaaatctattttatgttaatttaaatgattacttaataagtatgaacattcttttggcatttcattaaaatcttagtttgcatataaggtgttttccattcgttttttttctttaacaattatttaaaacatcatgtcctattaacaagatttcttttctggcacatttgattctatgcactaacacttcacttttagcttcattggcatttctttgcattgtgctagaatttcttttccttgttttgtaggctctgtgtgttttgtgcacatcggtgtacataagcacagatacaggggttacaagtgtgcaccaccctacctggactatttacatgggctcctggccttgcaaaccaagcattgcaaaccaactaagccatcccttcagccctgtcctgattttcttagtatttagctttattcctatgtaaagtatcaaattttacaaaacaaaactagttgcatttacttatgtagtgttggtagtgataatgatcatgggtaactattggtttggaaatagaatagcaatggctttattctacagttaaacttaataatcccatagataaattcatctgttaatttgccaagccatgactgaaggtcaggcactctattacatgtttcaggatagcaataagggtagtctttgcttgaacagtgatttctagctggttgtggtggcttattctgaaattccagcatagctgtgagtttgagaccagcctggcaacacaaattacaaatcatcctgagctactctttgtctcgaaaccatcaatccatgcgggctagcataagccacttggaaattcttcctgcaccaacagcaaatgcagtgactgttggaagttggctgttctctgctttcagcgccctgtggacgcaggggattggactgagagagaagcatgtgaaatgccttgtgtccaattaaagggcagtgtgctccttctgaaatgggcttatattacctgccagtcaaatttctaataacatttcagaatagcattaacacacatctcacaaatgatacacttggaaagttaactatggcacacacctcttaaaagcatgaacacaccctggcttaaaaacaaaagccacgcaaaacaggccttaatgggatgggtttctggctttggtgtacctggaccaggacctgagccagctctggcaagttaaatatcacttgcaatactccgttcttaaagaagcttgaagtcaggaaaaggaaactagaaatttctctcaggagggaatggccatgcctctccctgcaatgtccttacctttcttcattcgaaactgtcgttttgtttttgtcctttggagtgagacagtgtcttaaatacaaagagatgatgtatttttaggagagaaaaggaaactaagaatctaagactctgttcaaggaaaactgaacatgctgcttgcttataaattttgtacctgccgcatcctttatttatatcctaggtgtgacgtttatggctaaaaaggggggctatattaaaatgtccaaaggctacacagacaaagataattaacatagcttcaacaggtcacttaaattcttctctggtgttatttcaagacaaaggcaactgtgtcattatctttaaaaatcgaccagagagatgaaaaacatcaattgttttaagatgaagatgatgataaaaaaagcagaatacagttactcttgattgttatgtgatgattctgaaaagaaaatgtctgagaagcttgtgagatgactcaaagggtaaaagcaactacaaggcaagcaagaggatcagagttcaaacctttagcacccgtttgataatcaaacccagcatggctgcaggccggtgtgcctgacatcccagagctattgcagagggaaggcagagatggtgagattagttttccttgttaaatgccaggctagcaccaggacattaggcattgttctctagcctctttcaatatacacaagagtgtgtatgtgtgtgtgtgtgtgttcagtagtatgtgcatgtgtgtgaatgtgagcacatgacacacgcgcgcacacacaaacatgcatcacacacatatggaaatgttgcatcataatatcttacaaaaggaagcatcctaaattttctaacacatctgtttgtcttgtcatgaagagaaaacaggcttatacagtgagttttgctgaataagggtactttaaaaaaattgtctagtaaatacatcactaatgggtttatggatggaggttacagcaggcactgtatacacaaatgacaccatttgtccttagttctgcaaagtaaccttgtgtttggtgccttggggatctggtgactccctagtagtacctatagaaggtgtactcctctggtggcttgtcatttttcttctggtgctgctgaggcactggtgttcagaggaatcttggtgtgacactcacatcagcaggcatgcccaacttccacagtgaggaaagtcagagctcagtgacccatgacaacagtggccaggacataatcatctccaaggacagttttagattacataagatttcagatacctgaggtctgccacatgtatgtttgcaaatagccaggattcagatttctcgaaaattgtgtgcagatccaaatatttaaaattaggattccaataatggcttatgaggctatgtaaagaagcttaaaaattcttcagcacttttagattcaaattgcttcccttgtcgtcatggagaatcctattatgttctttgtttctctcccacgttgatctcttcattagtaataagtgcataatctacagtgctggacacatgctcctatatcccatattttaatagctctacggaaatggcattcctacatcgcttcttatctataattgtgaacagtgtcctttctgctcggtggtagtgataaggcccaccagctttcttttttgtcataatttttaatcttcataaaaattacatttggggactggggatatgttctgtcagtaaagtgcttatggtatacggccaagtacctaactccagatgccagcatctctgtagaaagccacatgtggtaatccattcctgtaacaacaatgctgggaggtggttgagactgacagatccctagggctccctggctagacggtcagccgaattggtgagctatgggttcagtgagagaccctgtttcaaaaggtaatgtatggaggtcaagaggaaggcacctgatacctgatattcacccttggaacatatgcacaccaacactttacatgtgcacacatatgcacgtgtacactaacacacacacacacacacacacacacacacacacaaagaaaagactaacaaaatttaacagtatttttttttaattaatacccgtaggtggtctggacctcacagagatctactggcctctgcctgtagagattaaagaagtgtctggctacagagttccatcacaaattcaccatctaaatgttctttattctacttctctgtcttaattccacaagtgaggtctgccaactgcccttcctgctcccttccttggatccttcacctccttcatctcattatcatttttctccctcgtcacgtgcccttccctaaattcagactttgcccctttcggttacaatacagtaagtcacaaaaaaggctccaccttggaaaaccacagaggacactgacttctccaagtttatctatgcttaaaattgccaaggtttttttttttttttttcaaataagctcatagttccaaaattgagccatgtatatcctttaagattgacagatcactctgagatgtgtctctctgtatagtccaaccctggaactttccattgctgtagcctgtctataaggactttcaaactttaaaaatggtgccatcccctgagcctgtggagtgtgcacgacctaatgtggtgggatgccaggtgctcagtccctactagagcggccgggaagtctcgccttgctgcggggattccgtattgtgtctgctgggtttaagagcaaggctgcacatcagagctatgatagaatgaggcagatacacatatttctttatgagatcttggttttcacaaggcttatcagcagtttacttctgttgaactctttgaaaatgcacacacacacacacacacacacacacatatatacacacacacacaccctataactactgaatccgttcatgccacatgtatgaacagatattagtcccttccaagcctttagagtgtgcacaactatgattgcatgccctcaaatattcaccctcagcatcccagaatccctgaacacatcttaacacttccatcaacagtcctttaaacatttagccataaccttggcaccaagattttcgataaaaggtctgaacttgagacccatgaggcccctggctgggatttgttatgactggttgagatcactcacctacgacagaaataaaaataattctgataaaagaaagaatgaatttttcataaggtgatcgaacttgaagagcagctaatcagccatcccccaaatcggagatgcttgcaggaggctccctcattcattcagatcaaaactcaaaatccatacagagaagtcagttcgggcaggctgtgggcaggagtctaaaaaaaaggatactttgaaattctaattttgtggtgtcattaacttaattaaccagtgttgattgttctatgtgctgttggatgctcacaccagttcaagttggtgtagagaccacaggttgacattgactatcttccacaattacctctccatcttttttagctttgagacagggtctcttactagacctggaactaatagatttggatagcctgcttagccagcaagactgcagaacctgcaagtctgtgcccgatgctcctgacccagtgctggagttataaacgttttccaccatgcctggcttttgtgtcggtgtcaaggttctgaactgagatccttactgcccatgcttggctctgtgctcttggtagaaggcaagcatgcagtatagtatttggcagtaagaatcaggcatttgggggagcagtgtctactcttagagggatatttcttctaagaaactgaaaataacattttttttaagtcctaatttcaaagaagctgcatgccacaaaagctctagcctagtctttcactgcccaaggccaggctaaccttgtgcttttgggtcttgtcctgaccctggccagttccttcatccagagcagaatgagagccagcttcccccgtgtctttagtaacaggtcacgctagccggtttgaaaggcttccagagcttgtagaatctgtcctttcctaaagtcactagcattgcattatttagtttacggtgtggagaatagccaagagcaaacttccattttcccacactgcaccttgtcagggtagagtgtgggagctggcaggaaacagtgcacatatttccccatacaactgcatcgggtttgaatgccagcaactcttaaggcaagaacatgtgcttcaacagaattacataaaatcgggcttggggaatggaatgaatgaagacatcacactcagcctcgagccttgtgattacagtgcagatactgagtgacaagaagcaaaccagcttctagtagagaatgacaaaccaaattttccccatgtaagaccttctaatcagggtatccagggtatcatgtccaaggaaggctgcagtgtccaggtactaacaaagcctaatcaatacacacagcgctacatccgaagaagaaggaaattacctttgttttgttttttgtttttaatcagaccttgggcacatggaggtaatccttattcttctccactagggttctgcagatttcttgaaattattttctgtacagggctatatctatttaccctatcagccaaatgtatcagctgtggtcctggtgagtgtaaaccaacagttggagaaaatgctgctcagaggccctcctgtccagggaacttagagtccagtggtcacatttgtcgttggagcattttttttattaaaatacttatacttaaagcacaagataaacacaagaaaaatccttaatgatgtagaaaaagaacttatagacactcttctacgtatctacagccacaatatatgcctatgtcccaccagaatgttgacatgacggtcgccatctgaatacacaggaccctcctggccagatgaatcctagagcagtcagaacagttactacagcatcccctaacctttttctgcgagaactcaggatcttgaactgaacctttttttttttctttgctatatccatggccattctgagctagctcccttatggctctcctgcagagaccatctgaataggtctatagaggtttaaccatgttgggagcaaatttccaacacaatggtgctgtccaatagaataaagttaaataaacaaaaccagtcaatgccaagtacatccgtgtatcttgaatttcaagtggcaccttcttactgaatgtcttatagaatgagaagtaataactgttaatatgttttactataatttatgaatacttatttctagaaaatattttgattccaatatagtgacttgtacattttaatgatcaagaatatattgttatcggggctggagagatggctcagtcgttaagagcactgactgctctttcagaggtcctgggttcaattcccagcaaccacatggtggctcacaaacatctgtaatgagatctgatgccctcttctggtgtctgaagacagcgacagtatactcatatacatgaaataaataaataaataaataaataaataaataaataaataaataatttttttaaagaatatactgttatcaatgtggaatattagtcagtattgtaatgtgtgatatagagaaaaggggaaaattacacctagaaaagaagaaggtttcttatctcccatgctcttatttgcctcaaacctgcaggttgctttcttatttgttcagtggccccctgcaagtgtgcaccatctcttccttcttctggtatcctattccagggccatagagtgccccacatagtgagttcttaagaaatgcatttcaattcttttttaatgcagtgtctgacactactgaggttttcagaccatgcattcacagatccagaagcacgccttggctttgcctctgagcgccttctagcaatttattgcttaaactccttaagttgcttctcaggtgtctgagagtgaccagaggtcctcactttcaggtgtgggaggcctaaacctggcccaagctgcctgtccatcactgacaatgctccggaaatttagagccttgctttatttactaagtggacacttcttcgtgccaggcactgtccctgggattgggattaatgcagaggtagacaaggcaggtacaaatctgtgactgtcgtcatcttacataacagtgggatgagagtgatttgatgccttcattcagattctgaaatttgctacagagtgatcatgttggggctcccgagggatccacagggtaatgggtcatcaagtcacttggattaacactaaggagacttcttggcaacacaggttattttctgcatggaggctgacaaaaatagatggggttgatgtgaggataaattaagcaactgtgagactcagtctcaatcgatcatgttgtaaacacttaatcaaaggtagttgtcctgctggtgcggatactgaattgtttgcaaacaattttctatgtgtctgggaagatggctcagtggtggaagtgcttgccgtgcaaacatgaggacaagagttccaattctgagaagccatgttagtgccagggggatatcctggcccctttgcaattccagtcctcaggataatgggtcctacaaacacacatgcatgcatacacacatgcgtctatgccacatacacataagaaataaaacatttttgactaactttcaagatgctaacacaaagcttagtccagagcagcctctatgactagaaaggccctttgtatgtacagaaatttaggtgcactttgtggaatggttgtaccaggtgtcacctctgtctctgctctttctcttcctgctctagaatggtgcccatctctaccatggaaacgtctacaacgagagagagagagagacagagagagagacagagagagagacagagagagagagagagagagacagagagagagagacagagagagagacagagagagacagaaagagagagagagagagaaaacactttagaaagtggttctcagctggtgggccacaacctctttggagtacatatagcagataccctgcatatcagatctctacattaagattcataactaacaaactatgttaaagggtcacagcatcagggaggttggcaaccactgctctagagccacacggcttctcttcacttcaggaagatgcccttccatttccaagcttctggggaaacttcattacctttgccttggggctggggactaggataggtagcaaagtcacttttgctggtattaattctgcaaatgggatattgaggcaggacctgttcatctgtgagaaagaatgctaagtattgccgttgcaaaaacaagacttcatgctaatggagttctatgtcttctaaccaggactggggtcatttcaaaaccccagcaaataacagctccctgtggtgtccttgactttgctcgtgttgtagaagtctctcttcctttcttccttttaatgctgcaaatgctaagctcccactctggtacccagaactacatcacatggaccagacttcattgttctgaagtgacaggtgctttttgtacttcttgtaggaatgcaggagaaaagagttcatgtcaaatatgctgatgattgttaaaattaatgttccttttaaaatgtcttttctctttgtgatggtgaatttcatattttgaaccctttaagccaggatgaaagatacaggtttttataataaatcttcactccaagacaaagtatctccaatataagaaatagaaaaaaagtttttgtcttagcctctacctaaaggggtttattttaaataatatctggatctgaacttggatctatgaactatgcaggattgtcacttctggtcaccatcattccttcccattctacgatgattgatggttagtatagagcagtggttcttgaccggagggtcacgaccccttttgacaaccctctatcaccaaaaatatttacattatgatccatgacaggagcaaaattacagtcatgaagtagaaacaaaactaattttatggttggggtcacaacaacatgagggactgtattaaagggtcacagtgttaggaaagttgagacctatcagtgtggatcactatactgtgacactgagaaaactcaagatatattcagatccaacctgaagacataactgatatatatatatatatatatatatatataactgatatatatataatataactgatatatatattccagaaaggttatgtggtagcattagacatatctttagaattttttttatgtttacatagaagaatagcatatcacagaagcctgagttcctagcattttgctttaagattaggttggtaatcatttctagatggtgcatgtggcctgccaatatgaattctgattaatgtttacttttaatgtctttctgaaaaccctaagcctattttatctggatatcaggtagacatatgatttcctgcatgttgatgctcaagagatggcttattgcataagtgtttgttatgtaaacatgatgacctactttaaagtcccagcacccacttaaaaagctgtatgtggtccaggttcacccctgtaatcccagtggtgtgggaggcagagagtagaatattgctggagattgctggctgctagcctagttccaagttgagtgggagaccctgtctcaaaagaacaagaattgagagagatagaatgggattccaggcattctgttctggcttccacacatacataggcatgtccatctattcattatatgtagacaaacatggaatacatataccatatttatacaccacagacatgtagagagagagagagagagagagagagagagagagagtgaagagagagagaaagaagaagagagaaagagaggagagagaacgagagagaggagagagaggggagagacattaattagggtattttgatgcctgggatatatggcttccagggctgtcagagaaagacagagtagaatctttgacccaaccatgcttgtgagcttgggaccaaaataatggaagagactgttattatcaggagttgagattcaagtgtccgtgtgatgttgagtagctcatttattaggcagaacatagtgacccagtgaacatacctgatcgtcatgtccagtgaatgagttgttttgattgggtaaatacggcttacattgctatggcagccagcagtctaggaacgagagtgattgacaagatctctgacatcccaggcaaaatgattgacgttagcacagctctgttacagtgtggtggagggtcctgtctaagcctctggatttgctgtctgttagatgtgcttttcagtggctttgttgctctctgaattatgtaatcttttaaagtttgcacttgcttggaaatcaatgaaccaatgcgtctatggatatacactcctctttgaacgatgttagaaatacgaggtaatggaggtgagatggctcagcttgtaaaggtgcttgctgccacatctggtgacctcactttgattcccagaaccaacaagattgaaggggagtactgactctctatggctgtcctctgacatcaacacaggtgccgttgtctgttgtctctactttaacacatacacataaacaaatgaaggaatgaatgatcaaattgtagtaaccagtatgaaagttgaggccatttgaataaatttttgggctagacaatggtctgtcagtcaaactgaactcaggcgcaatgctttcaaagtccagctcctttcaatagattggggctaataatcacctttaactgaaattaaaacaaacaaatataaaacaatgggtcagagatgtaagaaagcaaccaatgagttgttttgccccatcccgctctaactgccattcctgagagtcaatgtttgccctgtttggaggagaagagaattgcagagctgtcttttattagaagtagtgccggttccccatggtgggcaatagtatgttctaatttctctctatttttgtgatagaagactaggccacacaacaccatgaccaagaaacaagctggggaggaaagggtttagtcagcttgcaaaattcacagtgctgttcatcattaaaagaagttaggacaggagctcaacagggcagaaacttggaagcaggaactgattgcagaggtcatggaggggtgctgcttactggcttgctttaccatatggcttgcatccttactagaacccaggactactggccatgggattgtaccactcaccatgggctgggccctcccccattgatcactatttgagaaaatgctccacagctggaccttatggaggcatttcctcaactgaggcactttcctcactgaagacttcagcttgtgtcaagttgccacacaaaaccagccaggatggagactatcatcagtaaaagttaggcagatgctcaaggcaggaacctggagggaggagcagaagcagagacatggtagaacttttgcttgctggcttctctctgtaaaattggcttgttccatttgctttcttatgcaattgaggaccacctgcctggggtggtattgcctatagtgggctgggtcaattattaatcaagaaaatgcccccaaagacttgcctgcaggtccatctgataacaatttcccaattgacatgccccattcccagatgactctaacttgtgtcaaattgacaacaataacaacagcagcagcagcagcaaactgaccagcatagcacacacaacccgcccccatacactgatgctggcagattctgtaactctcacatacccctaaccagtctctctcatcagtatccacattgcattaagacatcgaaagcctttcttaccatgatgctatggctgaggtaatggggatgatgtaatttacaagtcccagtcagtgcaggttacatcacagaactgttttgtacaggtttgtcaaagatacctgaggaaacttggaaaggcggcgtgccagctttctctcttgtgcttgcatattctgcctttgatcttttgggatgtatagcaacttgcttattgtttacccatgtcatattcagaaaggtacagaataaaatttccaagggaagtcacattatttgacctgaatgtcaggtttcgtagcttatctttagacatagtgaaaccttggaaaaagcttgttttatgtgaaaggtaaactctcaatacttgacttttctcccctggatgtttcgatgacaaaaggtgtcccctcctttttaaacattcatttgcccacagggctacattttagtccccaatgctttaccatctacttcttcatctgctaggtgtacacgaccacccatggacacagacctatacatatgatgtcatcttatgaaaaaaaaacttaattaaaaactaggtttctataaaaaataaagtaaaataaattcttgcaaaaaggatattggtagaatattttagtttcctaaaatttgtgtatttttttttagatgtagaagtgcctcctaaggttactttccaaatgttttactatcagtttttctcattcgcacgcaaacaagcatcttaaaatatttgtgtgttttgcctcacaacaaagaaaaaaaaaagtttatctaaaggactaagttcctggtctagggccttttacacatatattaaaacttaaatctttctttgggaagctaaatttatgaaacaacttcacacccttttgttcacccttaagaagatttcagacttgctgaagtcacttacatatgcagagcttgtgccttgccattgctacccccagttttatcaagagctttccttccaaaatatagccttctttatacttgatttgcgatgctaaaaatcttcgaggaacatcagccaattgagtcttcggcgtctgaatcatattttagattgtctgaatttctgctttacacaggaaaccaacaaatcactactgccccttcaaaatgcaactaaccttctgccaaagggagaaaccattcagttgtcctgatgagtgacatctgactgtgctatcttactcatgggagaaaccattcagttgtcccctctgactatgttctgactgtgttgtcttgccataaaatatttgcgcaagtttagcaccggtgtgctaacttctcacatattgtgaaggggtgactaatgaagtgagcatctcgacttgcagacagaatccatctttaatctcccatttagacagaaaaaggaagagcctactggaatctgagtcaaatgctacatgacccacagtgattcgggtatgtaactcatagatatgtacaataggtcacgtgcaagttcttggtgggaaccaaaggcagggtgcacataagctttgagttgcatgacttttttacacacctctttgtctcctccttacaatcctaattactatcatttttatcctaaagcaaggtgaagacataggaagccacattaagatcaggtgaaatggtcaccactttattgatatcttctctataaactggctaagagcattgtatcagttttctgtagattcattatcctgataggttctcctaaggcatccttccaaattcaagattgaagtcatatttctgggactctgagatggctcagctgataaaggtgcccatggcaatcctgacaatcagagctcagtcctcaggtcacacgtggtggaaggaaagaacaccaagctgccctctgattgccactcaggtgctgtggcacatgcatattcatatgcacacatgcacataaaagttattgaatgtaaaataataatgacggtcataaaggaaccccagcatcttgccttttgtgtgctatgtacactaaatatattatataataaaagtttctccctttctgtgctcttattgcataaattaaaattggatgaccaaatttattaacaggattttgccaagaaaaatatactcattagatataatttggttcttgattaaaaaaaaaaaaaaaaaaaaaaaaaaaaaaacaagagaacttggacccgatctgcatgaaatggcagtgcaggagcggggttcgcttggcgagcagaaagctggagtagggctggttcctggcgttgcttcctcagcaaagagaacaattttaatcagttacaaaaatatttgcgatccatatgctcctctctgttcactcccatatgcccacattctcttttatcttgggaaagatgatgacttcatgattcagccgtgtaagaataatacctcgctgactttagagttcagttctatttcaaaacatgtcctggtaattacgcacacacacagatccaggctgttagcacttgggtagttacgtgaatatgagtttgttctgtcttctggggaatatatattcttatatcctcctactgaagccaggctatgtatctgaggcttcaatttgaaactccattgtcactggccttttggattaaatgcccctgtgcaactgtgagggtaagaaaatgagacaaaggctataaaaaaaatcacaataaattcattcaccttgggaaaaagaaaacagcacaaaaagccacttggtaactttatgtaaccggagagcttattctagcgacacaggctacattgatccttttcttaattttttttttcattttatttaattaaattggccatctaccatggtagccatggtacaaagaaccagaatagaaaaataaaaatgactgtcaatccatgatctcttttgtctgagatgtgtgcttgcctatcccaatagctctgtggtttctaacaaaaggtgaacgtttttaaagcaggttgtctgtcagcataaaagatgaataactatgaaattattgatgggattcatggttgtattttcaacagttgttttccactgcacaacaaatggctttgtaacccaatatgctgttaacagagccattgccaaaactgagaggaatcagccaggcccatctagtctagtagggagggatggcaaagagaaaggctttccagccttcggagcagtagttacatgtagttagtgttttgcgggcaataggacccaagaggtgtgtcttcctctgtcagtgtctgtgccccccaccacctccgagagactgagcatttgggtttgcttttggcaaacgctctcaggatcccgactctgtttgcatccaagctgtctgtgtggctgctcctgtaggagtttcgagaaaagaaagtgtacattagagcctggattgtttgcaaggggctcggagtgtgccaatctgttgcttgctgcgacagtgattctttgctgtcacacggaatgctcagctggcagagttgtccctgcggggaaggaaggagggctgtggagagattgttcaccgggaagcggggatattagggatgctttgcacactgcctgcgaagtgaagggtgctctttcagctgagccagtgtgaaagttttctgctgtcttctccctctttcaaactttacagacaaggcctcattaaccccaaacctgttcatatattgcatgaaggtctctcacaaaagactcatagatgtagatttaaaggatatcgcaccctcctataatttggacaaaggctttgatttagaaataaaaaaggcaaacctttgccatgtaggtgattttgattcttattgaagcaaacacacaaacttgtgtgtgtgtgtgtgtttttaatacaaagtgcgagatttcactaaaaaaggttaaaattgaagtgagtaatcttcggtgcataattcagttgttaattttagctccttgcgtgggtgccgctctgacttgaacagccggctgtagccttcattggagaagaagccggcagcttgggacaggtggagctggagcaagctgggagcgagatttgctggaagctggtcattagtattagaaacccagtcttacttactgtgtgcttctccggacggccacgacgattgccacaatgatttactgttcttcttctttcaggttgtcgaccatgtgtcaagctgtgtaaggaaactgcctcgagatggacactctggactgctaatggggacatgggacggcagttacctctgatcacttgcgtggattctcccggagcagaacgacagaagccgccagtcattcgcccagatctacagctggaattctgtgctgaaggtaaagcatttgggggggtggggggctgcagctcatctgtattttactgacattcttctttcatgaccatacctgtctgcagagaccaaccctcagagtcaggacctgtctgtctctcgggtattcgaactcagtttgctcactctgtttaattattgtttgtttggttttgttgttgttgttgttgttgcttggttggttggttggttttgttttaagcactctgaaaattgagtcagggcaacagaagttctttgtctcctcaccctactgactgctgaggcaaagcaaactgggagaatacaacttttgttttgttaaggacacatgctgggtaaagccctggtagaagacatttgcctaaaggcggcagaacttaaaacctccccaaacttaaaagccgcaaatttaccaactcaaacctctgcctccttcgggaaaacttttcccttccacaatcccacaatcctctgccaaataaataggtccgtgtccttgttagattttgttacaggccatctgtcctgtcacggtgggtttcagcaaatccgaaatcaagttggccatggtgtggatttgttccatgattgccacttccagcagagaataaagttcctaaaatagtgcctggtaatgctgccgcactcacagagacaatggactactactctgtcagaggcccctgtaatgaccaggatgggacagggactggtggcgaagcttgtgaaggaaaggaccttccaagctgcagctgctccactcccacccctctctcatctgatggccccttccccttcttccttctctgcttctcagtttttcctttttcctccctccgtcttccatcttccctcccttcatttccgcatacacgaacaggaaataaataagtgaatgataagggatctgtgagcacatcagagagaaagaggtgccagagatttttaaggaggttaaagggggtgggggtggggcaggaacaataacggaattgaagtctaaaaagccacttcctgtctgtagagcagtgtgctctgaacgtggagtggcagggggcagcagcatttatcattagtaccacctgccaggctgcctctcctgagcttgcagcactgatgcagcccaggtactgggcaggaacaggaagctatgctgctgctgctgctgctgctgctgctgctgctgctgctgctgctgctgctgctgctgctgctgccatggccagacatagatcccgtgtttataccaaatcataacctttccatctgagttttgtccctgaacacagtgcagagtattccatgttgctgggtgctggggaggtgtttccatggttgcaacttaaaaaatcattttctgaattatatctgaggtgctgcctgcctatcgataggacctttcgactcggatgttgggggggggtcacctgttgaagcactgagggactgtcaccattttcttctctctgtagtgggatgtgggtcctaacatgggtgggagctcagtgtcttggctaagaggagttgactcattttgacagaaggtgtacgcacatgtgctgatgtgtgcgtggatgggctaaggctgaggtgacgcacctgcctcctgtgtgtgcatttgctgctcagtattgtcttgctctgtcctctggagtgtgtcacgtcgtcggtagggatgctgggctgtgcctctctgggtgtgaattcacagcggggagggcatgagagagctcaagaataattggagatccttccctgcactgatatcgtttttttttttttttcttttttttctgatactgtcaccttttagggtctaaaaactctttttaatttggatctgggagaatgtctgagcaaggaggactgactccgaccatactggaagaagggcagacggagccagagtctgccccagaaaatggcatcctcaagtcagaaagtctggatgaggaggagaagctggaactgcaggtgagctacaaggatctgtccttagacttccacctctaggatgtgtctgaggttgcattaggagtttggtcgttaaaggattcggagatcaagtttaagaatcgaccccaattgttcaggtttttcttcttcctcctcttcttctcttcttcttcttcttcttcttctcttcttcttcttcttcttcttcttcttcttcttcttcttcttcttcttcttcttcttcttcttcttctccttctccttctccttctccttctccttctccttctccttctccttctccttctccttctccttctttctccttccttctccttccttctccttcttttggtttttcgatcgttttgcttttttaaggatgccataaaagtgcctttagaaacaaataataaagtcatccaaggagcatatttaatcactgcatttgtatacaggagcccagtgctccttgatagactatctcaagctgtgtgtgtaaggactttacagatgtggctttaggctcttgaagtcttggcacaaattccttattacatggaaagatggagagacagctcatacatgtcaaagccctgtatgctagtcatcgtagatgtgttaaggtacaaatcttattttcaggcaaacggaagcccaagagtcctcagctgaagagtcagaacacaaagacaaattgggggaagggagtgggacctggaaagagctggctggggaagcaggggagaggcagtggaaagagctggctggtgaaagcaggggagaggcagtggaaagagctggctggggaagcaggagagaggcagtggaaagagctggctggtgaaagcaggggagaggcagtggaaagagctggctggggaagcaggggagaggcaggattaactacaaggaagaaaagatgcgggtgcagggaaggcacactgagcttgtaaatgctatcgattttcattgaactgattcacagatgtgttagccatctcaatgagccaaccttatcaaaagccagtgaacatagagtcatcagaaactttccaggttggttcttcattcctgggtttgctaggaggacaaaggactaaaagtgacagtgtcgaatgattgggacttaggccaggagggtgttctgcctagtggccgtaacatctttgcttcaaccaaggatatcccattatcaacgataatgacatgttcctctttgatttttctctccccacccctccttctgtctttctctccatctctttctggttctctgggtttttttgttttttgttttgtttctgtttctgtttctgcttctaccatgcagcggcgactggcggctcagaaccaagagaggagaaaatccaaggtagggatctccagggtcccaggggagtcagcaccacagttagaataaacaatacatttcccatcagagctgaagatgtgcccatatctcagaggctggggtgggtcctgcctgtcccatacaagttggctgtcatgctcaccttctgtctcatgtggatgcttctggctcagaatctgaacatccttaagtgttcctaattacagtaggagtttctgtggtgcttgacccaatccacatccactggagattttctcttgttgttgttgttggctaaaatttagagcagacatttcaatctttcaagtgatctatacctgaaaatgaagagacggtgttgctcagtgcttagaatgcctccgctgtcgaatcttctcctaatttagttttaaaggaaatttgccctgtcagggctttcttgtgatgttttcaagaaatgacattcattcaccctttatgcttgagccaagatcgttaagaactgttgcaagagtttttatgctgggcactggctctctgatacttctctttaccctttgcacccagaaccatttagcacattatatcctagactgagaagtctgatttgggaatattcatgcaaataatgtgatcgaccgccatgctttgacagtctgagaatgctttctgctttttttccccctccttaatctcaatctgcagtcaggagcaggcaaagggaagctgaccagaagtcttgctgtctgtgaagagtcttcagctagatctggaggggaaagtcaccaggatcaggtataaaagctggtactagaagggattgcatgacgacatctctgtgtgcatgctcaggtataaacctggtattagatgggattgcatgacggcatcgctgtgtgcatggccactactaatttgacattataatgatgttttgcgggagaaaacaggaattgaagaacgagcattttcttgcttcctcctgtttatgagacattctgcatagtttagaagtttggggctggggacataacttagcaagttaacggcttgctacacaagcagtttggcctatgtttaagccctggaacccactcaaaaaatgaacatggtgcatatacttgtaatctcagcaccggggaaataaagacagacagattgactcctgggattcaagggccagttggctcaaggcctaaccagtgagtcccaggtccccatgagagactgtctcaaaaataaataaatgaataaataaataaataaataaataaaggcagatagcaaccgaggagaaacacctgagactgacgtctggctccacatgcacaggaacttgtactcccagatgtacctcccacaaatatgcaaataacccccccacacactcatacacccccacacccccacactccccatatcttgcacaactagtttcaatgtatatcacaggatattgcatttgtttttttccagactctctgagaactgcaaatggaaaggaactcaaaagaatttagattaaaacttaacttaaaaaaaaataaaataaaataaaaatccagtaagcacggtagtgctggatatccaccaaggctctctcttgataaggctgaaccaaatagaacccaagcatcctgtctttctggagacagcttacctctcagctcccaaatgaacttgcctctaagtaaaacaccactgttggctcctaggggatgtaagaagtagtgtctaagcaccctggactgtggtaaagtgccggaatggacgtcaggagctttttatttttattttatttttttgactactgcaaaaacggtccggaaaagcatctgacctggtggcaaatttgatattagccagctgctacacatctccacccttatctttgattcccaaaacttaaaattccaagaaccttcacaccctcttgttactctttttttttcctttttaactattatatttatctgcgtatggaaaacatagtcttgatgctgaaattttgcttatttttctcagaggtcaaaggcagccaagacaaaaggcagatgatctgtctgagcccagaggaagggaaattgattacaaaatcattcatttttgtttggctttctttggcttctcttttatcttcccacccccctttctgctttaattgaaatcctgtaattctccttatggacacagagaacatggagagtgctttctttaaaaaagaaccaaaagaaaaaaaatccttatagatgtttgtcctaggagtgtttcctttattagtctcattttcttcacatgccgttcatgtggagaggcacagacaagctctcgttcggtagccattactatgtgtcatagacagccccctacccccttttttaaaacttgggctctgagaaacgtgtggctttccttcagcattttatgtgtgcttctatttttaacggagatgggaaaggtggaatggtgtgaatcccatgccttgtactgtcaatgtagatgggtggcttgtgatgtacagcatctgacttgtgggaaaccctgtacagtgccaggctccgggagaagtaaggacccagtcgtccctcactcctaatgccaagcaggggaggccagcctctgtagatttcatttgctctttgtctcttttgacaaggcacaggagtcttggtaagagccatctgtgccatagcacccatttcagaggcaggtctagtggtacctccacacagtgggtgaaaacggtgctttgttcctgctggttctgaacccagaatacaggattcatgttggagcagagaattaggcccctccagctttctgtggactagccaaagagtggtgggaatagggggttggcagaaaaccaacagacacatatataatcaactcacccgatcttaagaatttatacgcaatgccttcactagataacactgaacacttagaaaatgtgtggactgactcccagagaagtatacagtacatggaatgtattgcttcccccgtgtttgtatattcacagtatttgggaaactgccttcattttcctgtgtgggaaaagctttcttgtcccccatgttacttgatctcagacccacacctgatggttcagtctgtcttcgagtaaaggaagcgtgtttttttttctaatgttataatatttactgaccagtgtgttactgcaacttgaatcattcttttactgttgttgggtataaacttatcctgtaccaatgtatttattaacacttgtattttaatattgagcgtatcaataaaaatatttaaaaataacagattgttttttaccaattctacagcactttttgtgtattctttctacaccatattgtatatttatgtgtagaaatatatttttttgaacctgagtatagtatctgtcaacacacagcagcaatttgtacattcggctacagtgggtgtctttggcttctgtttttgtatataggatttattgccaacatgatgacttttttagattccaacttagagagggctggatggttcgtacagttttgaagaagaaatggaaccattctctcatgacccacgtgcccacaatttctctatgagtctactgatggcctggctgttcctcagataccacctcagctggaaatgtcctagggatgtcctgagaaagtaaaagcaaactccagcctctagctcctccttgaaccctcactgactgcaacagttctctgtccctaatcacttgaagaatgactacagtagaattacagtctgatttgcatatcttgtatatgtccacccctccccccaaaataaccccccaggagttggaaaacccaacttagttaaaaatttaggaatgacagcatgttttatctcctcttccatatcgtggaagttggagatcttttttgttttgttttgctttggtttggtttagtttttgtttgtttgttttctctcaccaccgtggcaacttcccttcagctatcatttctaatgggggtccctcctcattggaaacaagactcaccccctgaccaatagtcgctgaagcagtgagtgtcactaagtggtctctcatataccacacacacaaagccagccgcaacttccctaaaacatcatgactccaatcaacatacactgcagaaactaaaaaagccaaacaaaacatcatgtgatgcattctgctccaaagaagcaaatgtgcaatcaaagtaatggctactgcgtgtcaatcaatataagcagatcagtttccaggaaaaaaaaaaaaaaaaaaaaaaaaaaaaacaatgattagcaatgtagatgtagttcaacactgtagtctgtatcaagaagcagcacaggagaatctgtttggggtaaaataaactacatttaccccaacatagacttatagataacttatgaaaacatgacaggactcaccacactttccaaaaggctatgcctttttgtgactctgatttataacaaaatattaatgacattcataaaccagccctataaccccagatctaagatctcagcagttacagggttcagttcgccttgtgtggggtatccttcgtggcctggttccatggtaggatttctactgtaaattggatgttgggtgctttctttctccgagttctaactgtatttctgactcctggaagctgtctgtctgtgtgcacctttctccttataaggagctctagaagagagttaattggagaagccttttttagacttgacagtggctccaatatgaacagattaaaggatcctccctacacacactacacatttaaaaataaacctgtagggaaaaataagagttgtgatctacaggagtttagcttgattaaagttaatattcatgaggcaaagtttaatactagatatgtcttctgacctcccattgacttctggatttcagttcaccgtaaagggcaagtattctttttttttttttttttttttcctgacaggcttaattttttaaaccacttaagaaagaggaatccatacgaacctctcatttttcaatacctcgtaacctctgtgcagaatggaagccaggcagggatgattacttctggccctaaattatgatattttttcccccaacaggaatcaattcacttacagctttccagtttccccagcctgcaagaggaggataaatctaggaaggatgattctgagagagaaaaagaaaaggataagaacagagagaaactctctgagagacccaagatcagaatgttatcaaaaggtgaatctgcaaaacatttccttaccttgcttatcatggacactcgcaaagccaagagacattgcaaacccacaccaatgtttacagcccagggcactctgcacctaattttccaagtggccctatatgtgtaagagagaaaaaaatagcgaccttgactctctttttgttcctgcacccttatttgtatagctagagaggtttatttttagaatcacttatttctttgagttcccatttgaatctcctgttctcagtgacaagctggggagaaagagggaattgaaatcggttcctgtattcaggttcactgacaactgacttggattggcgaacaatggtgatacacagctttctattttcgctctcacccttatcttaaaagacaggcagcaagggccttagcacctcctcgtaataagccacaccgggtggaggtcaatagaagccctggcaccaagggcttcagtctctgcatctggccactgctgcatgttgtttcatttgaaaacataaatcacatttctatttggaaaagagccattcctcctaaaaactatagacctacagtccagatttttagactgtgaatgtacctctaattgtacaaagtagaaaaaagccaagctggaatggagagctatactggagaccacactgggaatccaagcagcctaggaatggtagccactctttgtgctctgtaaacatattcctgcttggagcagttctgtctagttgaaaccctcactcaagcttggggtgtgtaagaggaaagagcacaacatgtctaaaatgactgtataaacctgtatttatccaggaccaggatataagaaaaactcaagaacatttatctcttgccatgttttatactgattaatatttaggtagttttataatcaaaacttcatttttaaaaactgttctgttttaatttaaaaaaaaaaaaggttgtcatgggatcacaagctcttgaggtctctgtgggttggatgtacctgtcatgtggaggcagtaccccactggttttctgcacagaacacactccaccaccaacagcaagcacacttcccctcctgtgacactagggtcttcccacagtcaaggtctcaaccctcaagtcttatttctgatgttatgatccctgcttgcaagtattttctccctggtaccttcctttgaaatttacctgagctggaaggaaaccagaacgttttcaaaccctgccccaccctgtattcccatcatccatctgggcaactcaactccctcctgctgtttgtttcagattgcagccaagaatacacagattctacaggcatagacttacatgggtttctaattaacacgctgaagaacaattccaggtaaatttaaatggtgaaacaagctttttgctggtgttgtgggagggtggggagtcagaaagaatattacaaaataattatgattaatcagaatacttttaagaaatcaaatactaaaaacagatggcttccttgatgtctctcctgagcttgctctgctctgttgattgtatctccttgtggatggctagccctaatagtcacatagttgctccctgtataagttagagtgtaccaactttgctttgctaaccccaggggcatattgaagtaaaaaggagagaatgaaatgatgtttatttacatcagtccatggtgcctgggtgcaggcacatagtcatgtgtactcagggctccagcttggcttctttccagtttctttcaactttaagtctttgttggttgtattattatcattcagaaatttacatatcatgattatcattcgaatgatgacatttaacactaccaaatacttaacaagggagaggaaaaatgaaacttctgagttcaaagtcgtggcatgcaaaccaaggagtcaacatagtccgaagatgaattagagttaggtctgctctgtttccccgttgagtttgataaattgtatttgctctttgaaaactaaaagtacatgaaacttttcctttgaacatttatttttcagggacaggatgatactcttgaaaatggagcaggaaatgattgatttcattgctgacagcaagtatgttcaatggcaatgctagctaattcgatgacatgtcttagctcagtgtctgagttaatgactcattccacagagagctgtagataaataaaatgtcagctcgtatggttcttggtatgctcaatgaagaagtcactggatcttggagtggtcattgcttggatcacgtgtgatcttgcctgttaaatttctggcaaaatagccataaacagggggcttgcttagcccccactaatttgcatggaggagctgtaacaagaagggacccttctcgtttttattatagttttttaatgggctccagctggctgcagtcagttatgcctggaaataattgtgctgcgtttggtgtaaactgggtaatgacacatgtccagatagatatctgcaatctctattatgtcatggagcctgtcccctgcctgcctctgttgataaggtatcctgaactaacccagaacactttgcaacagacaaaatgaacatgcggctgagaaacagcaatgcctactgcagctcgatcaataaatctatgatagtagagatttgtctgcgagagaagacatcaggtggtgtcgaaatgaaagatgccaagtgtttctggataaaaggagatagtgacgtgtaaatccctgtaaaatatactactggcatgaaatgaagatgctgattttatttctgtaactctgttccagtaaccactataaaaagttcccccagatgtcatcctatcaaaggatgctggtccatcgggtggcagcgtactttggattggaccacaacgtggatcaaactggaaaatctgtcatcatcaacaagaccagcagcaccaggatgtaagtcccaacgtagtgtctgtttggtgttttgtttttctgtcagagactggtttataagagcacactattcattgtaaagtatgcgacgttaaatatgtatagcgctggttatctttctggcctaatagcagtgggatgtcaggaatccatataataccaaatgagatctagggaatttggtgggagaacttcacttcaaaatagcattcagattaaaaacaacaggcattgattggtctgggagtgtagctcagtggtagagaacatggatggcacacacaaagtttattagattcccagtgcaacaaatgggtaaagcctacgcaagcaagcaagcaagcaagcaagcaggcaggcaggcaggcaggcaggcaggcaagctctttctgcagagacaggcatgatagcatatccctgtgctcccagtactctggacactcaggcaggaggatcaggagttgaaaaatagtcctatatacatgctatgattctgtcaaaaagacggggaggggagatgaagggagggtggatcaaggaggggatgggttaggggaggaggaatcaaggataggatttataaagctgttacacagagacatttgtccttttctaccccacccccctttttgatgtgggggagacatgtgttttggggaaagctcagaacaggatacagaaaccttgcttctcaatcctggcatactgactgggcattccagtctgctgcagtcctgatttcccatcttggtttcttcacctgtgagacagataagttttagccctaagaagacaacacttggtttttctcaagatcatcactgtctttcatcttcaaatctttttcctatctgcactgagtcagagtcatcaagaccgacctcctaggagacagtcatttgccttggcacctgtaattgtctactttgaactcccgagcctttcaaatagagcttaaaccacttctttagcaaaaggtgtggcaccctcaaaaaactgcaaatcgtcattaaaaaaaaaaaataacgttctttcctttggggcatgtggtgatcacgtggtctttgtgtcagacggttagtgcaggcactttcctagtgaatggagctctcctgattaaagcaggctttcttttctgctcactgaaggttacagccagtgaggtggcctcagggctctttatctcctgggagatcagccagagctcagcagaggcactgagacagttaggaggaggagcactcagtaagaaacctagaccaagagtggctattatctcagggacactgtagcgcttcactttttttttcctcccgagtttcaaattgcttatatatctgcagaacagtttgaagtggataatgtttaagagctcttgaagctccagaattattgggtcccgcggttgtattctactgtgctggcaaaacacatctcaaaatttagcggcttcccactcgatctgattgttgacactgctgccgcctgtcttgactgtcatggaaattaaaggtcactcttctttaatctgagacatttttgttctccctcgaacacacccagctggttttggtgtggtattgtttattatttttacacgccagtctagtttttcttgtggcttgcaggtgccctacagcagagaaagatgccctgagaacaaagcagggaaggaattgacttctgtttttaattcactctttgtgttgcactctgaggactttcggaatgtggatctgtgcatagatagtgccgattaagcttgatagctttacaattcatagagagcggatttgttaatagttacaatagttttacagtctcacagtcgggatacgagtccaggtttataccctagctgatggcgatattacgtctctgtgaatactcttgatagaagtttagccttgtctatgaagctgacttttacactgtagcagctccattgaaagtcaattttaacttagctaaatttacatacaatttgaattttcaaattcagtttctttatctgattagtaacatttccactgcttacagggtctgtgattctagaagcttctgaactctcccctagattcttgtgttcccttcagattctaccgcaccacagtagaatgttatctgtctttaaggttttcgttatctgacctacagaggtcccatcgctaagcctcttcctttccagaggagcataaactttggacattttgagaaagtatttgtgcatgcctgcatgtctgtgtgaaccccaggaatgcagttgtccatcgggatcagaaagaagtgcatcaaatctcgctagacctagacttgcaggcagttgtgagctgccccgtgtaaattttggggagctgaacctggatacacagcaaaagtagaaagtattgtcaactgctaattccatcttgtcagcccccaccccgaggctttccattttcctgagcattgtcaaacagactacatatgtttacactaaggagagtgtacagtgatcacaagcatgggcagacagtaccccgatgaaggtagtgaccgctttggtgccagcaccaaatcccatctgatcacccccatctcccctaccaccctttatcatccttcagcaggtcacgcctaaccccatggtaagcagtgaactttctaggcattagctggagcatgaagccctctttctccatcatcccaaccaccatgttgctcaccctctgtcatttaaatggctcttgggaggggagggcaaatgtgccagtggaggaatttgagagtaaactgctacctctctgaaaagggagcaagaaggaaagaggatgaaataaaggccctttgaaagagtagcatatttcaggtttcaagacgcggatcacgttagcaatacaagcaaagactgttgtttcatgagaaggtatggctgttatagctgtctgctgctaggatgtttggatttgaaggtaaaaatagaccattaagatctaggtgccttgaaggtttcaaataccatttattttgtgtgtgtgggtggggggggatctgtattctctgcgaatgtgaagggttgcctcaccagagcaattgataatcaaaaggaactaggctaatttgtatatattgttggattgaaatctattgactcataggagggagagagagagagtggggatgagaattcctcccaggatccactctcagtggtgtgtttgaggaacatttttccaatgtgttcatgtttctgcagctcccatgcaaatccttgaaatatatgcattttaaatgtcatcctggcttaggagaacaggtccagaatatgaactctttgggtggagtgtggaaatgagctataaaactgagggataaaacacagttttgtatattggtttgttgtttgtttttcttcagtgagttctcatggtcctataaggtgtaccgataaatgtagatacaggaactatcatccctgtagcagccacaactgagtgtcatcagcttccttctgccatgcttttctggatgagaacaatttaagatattttaaatggggactagagcctgttaagtgtttcatggagagaaaatcgttctatatgaaatttagactgcttgggtcataaggggcaatccctgagagccacgtaaaagtatgactggcccctgtgtgttcttctctgtcatagcctcagttatcacccattggctctcccatgatggagaggatgggtctcaaggatatacttatgaatgacaccatctcttactgagaatcatggtacttactatgtgtacatcatgaaatatgctttaattcttggtttatgtatattatcacatctaatcatacaaagagaatttcagtttagggaccttctctatagagaagaaataactagcaggactcagttctaaaccaacgtgtatatttcactggtttattgaaatttagtggaatattgaagtgatcgttatctcaagtcaaattatctcagctactgagccacatcctcaagatggaatggctgcatccaatgtggatttctggaacatttagttttgtctacaccactttgagatcccaacaagtcctaggcatataggcacacaactagtcaggagttatcttggatccatgaatggaaaacacacacacacacacacacacacacacacacacacacacacaagccagttaatcttaaaatgccatggctaactcaatgactgggcactcctaaaccttgccctgctacctcaggtcagtggcctcttacaggaaaactcacatagctggttggctttatctcccgagttctcctaattctccctgtgtcctacccatgaaactctcagtgtcccacttcatgctcagccattggccactggcatctttattggtagatcaaaaatcaattgtggacaaggaccttcagcatctggacacacagataaaaagcattcgcaccaatttccaacagatttcaactgtttaattcctttgttgtctgataagaaattattgagatcatggagctgttgttttaaaggcattttgaagatttacttactcatataagtaaacaccagaatctttccatagttttatagcccttgatgtatatttctggcttgtcacttccagcatgtatggcttgttgaaagagagcatccatgagtcttatttatcaataatactagtatagaagatgaatctactccttgtgtacttacaaagccactgccatcagtagctctagattcccatcccacacacagcatcctcagctccacaaggaatgaggaaacacaatggtgagctttggagcaaagccattagaagttttgcattaatgctctcaacactttggggattcccagagaacgtgtgactttgtagcagagaggttgtattcttgatgctccgttgcagtgaacaaaactgaggatagctcatactcaaataattacagggaagagaggattcatgtggtctaaacagatgtatgctaatattctgcatttattgagcagttacaaagagctgatctttctgtagagatggtggtatctacttcttttagcctgataacaaaagactcttgtaaaagtcacaaccagtgcctgggctggaggggcaacttgccgagagggaaaggaaaagtcacaagttcttgtggggttatccaagacggtgctgctgtctgagtaaacctatgcacagtagagaatgaataaaatcatctgagcctgtagtgttgcaggttttccaggcctcagaactaaccaagaaagaagatgtgtgaccaattgtttccaggcacaccctctggtttatcacatgggtcttaatggctagtgcaaaattcttaggctttgacttgaaacagcagcttcaatgcccaaagagaaaaagccctatgttttttgtagttgttgttactgttgtttattttcccatattccattagttccattgcctgtctctctgaattttgacaacaacaggatttattctcaagcgctttggatttcccactattggccttctggttgaccatcaggctggggtagtaccacccattgaaaatctacaaagcagatactaaggtctatgttatttgtataccacagaaggtctctttaatcggttcattctttataatgtccctcgagatggaactcagagtctcctgtttgctaggttagagctctactggcgagctaatgcccacaccttcggtctctttctttctttgtaatgctgttatctatgtcttcaggcaaggtctccctatgcagcccaagcagggcttgcgtgtgtaagctgctgcctcagcttcccatgtccctgggatcataaacaggagacgccaccccagaccaatgttaccatttggacttttagataggaaactaaaactatgaacatttcagtttcatggtttcattacaaatgttaattttttctttgttacaagtgtgtgcctgcttcactagaagttctgtgcttctttttaattttgtctctctcatctccatgttctctctctcaattactttcctacatttagcacaaagatgtacattgttctttttatggaggcattttttctttctattttttatctccttctcctttttccatcccagacaaaggctgtagatctggcatttcccatctacttccacttgcctttcccacaaacagcgtgtgattaccgcgcatgagcacccagatacctttgcatatggcagatcaacttttaacttgtctcagataattttcatgttaaaaggttgtcatctcttcacaatttctatttcatctttcacatccacccactctccttgcctcaaattccctacccttcagagtgcagagcaaagcatagcagtagcaaatgctgtggaggacagtatgttcactctccgccaactgtgggtcagggggagagatcaaaaggctgctttaactcttaggaagatttccatgagcttgaggccagcctgggctacatagtgagtttcagatctgcctgaatacaagacgttgaagctagcctgggctgcagactgagcctctcaatagcaaaacaaagcaacacaaacaaaaagagagttaaatgtgcttggatttaactccatgattcttgaggcatgtggtccttggcaccagcctgaagggatgtgtgtgtgtgtggagcaattcatctagaaaatacagttaactgaggtgtttgtcagtaaaacaagaacaaagaagtctcttctaactgaacaaagtctccctagaaagtgccacccaggagattgaagggtctttgctaagacgtcctgaagagacagatctttattgcactaactacaggaggccaggccttccaccatctcagggcacagacctaggactgagaggctgggcccaggtgaaggagcacatgctctccagaatgtctgaagcaccaacgcttaacttggggatccttgggtgtctacaatgtggagtttcatagcctacaggggactgtgttttcactgaagcaaaacaaaacagacacaggcctcctcccatgtccacagcattcttgtccttggtttagggctgtaagggacactgtaacacattaacatcctgctagatccatgcttaccagagagctctgaagaagaccaaacctccatctaagtgcaactaagagtggttggctggcaccctgtcacttctaaacatggtgaatctactgttagcttttcgtaaggtccgtgctaccaatcatctaactagaaccaagtggcttgtgcactgaacacactccacttctttctctttatctgattgacaagcatacagtgtgctttggatacttaatgataaaattagtgtcatcaacatactcatttctctaaatacttccctttctttgggaagacacctaagtcctttattgtctcttaagcttaaacttgggactatttgtgaccatggtcaaactctctgccattgcctccaaacattatattgtcttcctttttcctctgagaatattgactttgtgcatgagagagggggattaaaatatattaatagtgttcttttttccaattgtacgattgtatgatacagtttgctatttgattttggaaacaaagcaagcagacaccttgtgtatagatcgaatctgcttcattgtttgaaggggccttgttcatggcacattgatgcatctggggattttgtttatttttctatccagctatctatttgttcgtttatttatttgcttgtttattcatttggctctcagcatggtacggtgtcaatcaagcctgtccatctcataggaaagaaaccaaagtccaagtttgtcttatctgctcaggtcacagatgaccaaagccaaggccaggagcttgctgtctctcagcccttgaccttgacctttcaaaagtcatgggaaaaagaatttccacccatagactcaatgatgtcaagttactaggaaattgagagggcaactaagcagtcttcactcactgctatccactggctcggtggcaaaatcttaatttgcatttgattattttgaaaacggcacaaagggatttggagacagctcagtcagtaaagtgctcatgctgcaagcatgagttcctgagtttgattcccaggatgcacataaaaaaggtagacttggtgatgcatgcttgcaatgccagcactggggagagacaggaaggaggctccctcgggcttgctggccagtcagccggtgcaaattggaaaatatcaggcctgcaagaactctgtattagataaaacaaaacaaagaaaccaagagggatcatgtccagaggcatggtacctgaagtttggcctctgatcttcaagcacacatgcaaatgtacttccccactccacacacatacacgtgtacacatgcacacatgcacaccacgcttgagcatacacacacacacatgcacacacattcacacacacagtgcttaaacagcaaaaaagagaatgttaacactaaagtagatggtaaagctataaaatgtcttagcacacttattagggaagtaagacctgactccatgaccttgaagtatgttcagcaaagaaatacttctcaagtattcagtactgtgggtctcatgctttgaaaatcaaacttcttagccattttctgttcactgtgtgggaaatcagcttcattacggttgaatgtgtaggtgtgtgtgcaggcacactcacaatgtgcaatgtcatttaatgcagaatgcatattatgtattcaggacagtcatagaaaggctacgatacaaacaacactacatagaatgctggctcaagtacgcagaccaaaggaataggctcaatcctgagagtgtccgccacccccaccgcagccgctgctgcagccagacccacttgcagcattggcagtattggctgatctggaggacacttgaagatctggactttacgatatgctgtcagacatattgtcgtctaccaaagaaatgagctcatacagaatacctttaatcccaccctgacttttcccccactgcagcctcttccagctcccacagtgaacacagaggaacacagccccagcttcccaacctcctctccctgccccctccataaaaccagaaaaagagccgggcagtggtggcgcacgcctttaatcccagcacttgggaggcagaggcaggcagatttctgagttcgaggcctgcctggtctacagagtgagttccaggacagccaaggctacacagagaaaccctgactcgaaaagcaaaaacaaaaacaacaacaacaacaacaaaaaccagaaaaagagaaacgcattgcatttctttacatgtgcaaaaagcaagcctacaacaaatggcggttcttcgtcaaccaattcacaatagcaatcctttattagtggaaatataatatttacctatgagttttaatgagctacttcacacaaacactataactaataaacagaaaacctttcattcctcgaaacaccaattatttttcacagtttcaaaggcagaattattttcataaacacctgactggccaatttggacactcatgaatcaaacattattcaaatactatgacacaaatcagatctatcataattaagattatctctaaccctgatgaaaatgttgtttaaatgtttcttcgtgtgctgtggcctaatgggatgtctcagtggataatgacacttgccaccaggcctgataacctgagctcaatcattaggacacacatagtgagagagagaaagagagagagagagagagagagagagagagagagagagagagagagagagagagagagaactcctacaagctaccctatggcctatacacaaaggtatgtacacgcacacatacacacacacacacacacacacacacacacacgataaataaaatctaataaaacttaaagtataatttattggcatacctactaagctcgcttattcagaaaatataaactgtataataagatttttttattattataaacctcaaagtactgggtaaagcacttcagaattgctaggattgcttacatccatttagtcctcctgtgcatgtacacattatatatatatttgctttatacagcaaagcaaatgaaccagactcctcctttattgaagttgtataaacctttaataataataataataataataataataataataataataataacaacaacaacacagtcaataaggtgcaggactgaaaagacaaagatacagtatgttaagcttgtttctcaatgttgttttgtatgttaaatggcattttaatattaacaataatctatagtaaatacagcttctgataatttcttctgcagacattgattcatatcctgaaatacactgggatttccaatagggaatagaagttagaatcattgaatatactactctagcaatatttaaaaaatattaattctttgagagtttcatgttggttagttttatgtcaacttgacacaagctaaagctgtctaagacggagaacctcaggtgagaacatgtctccatgaggtcagtctataaggccaacttgtaggacattttcttaattagtgactgacgtgggagggtccagcccactgtgagtggtgtcatccctggcctcgtggttcgcttttgttaagaaagctgactgtgcaagccagtaagaagcactcctccatggccactgcatcagctcctgcttccaggcttctgccctgcttgagtttctattccaacttccttcaatgatgaacagtgatatggaaatataagccaaaatgaatcctttcctccccaaattgcttttggtcatggtgtttcatcaaagaaataaaaaccctagctaggacaaatttcatacaaagtaatttgattatatgcacaccatgtctctcccctttgctgccccgagattctttatgtaagaccgatatagataaggtacagttggggtctaagcattttataagtttattaccactgagaaacagtttagaattaaaacaaagtccataaattaatactatagaactgaacaaaaattgtctcattaatgaagtgttggaagaaaaaccatggaaaagccccatgcagaggggtgtgtcttctgtctgtgtggaggctgctgacggaggaagcatgagcagagcatatcatacgtgtggtggaaaccacgtgattgggtcataggcttacttaaagagacaccactgaggttttatgaaatacaaagaatctcaagttatctttagctagtcccaaatgtcaaccaacactgtgattccaaaactgacaattactctgaatagcagccatctttgcaggctctttggaacttatgggatcgacatggaggaatgtctgtatagtttcatgaacttaggcatgtattgcacattgcctttacatccaaaactagaactaaacagttttccaaacatgttgcatgggaaatcattcatcggttattattgaagggcttttactttctgcattgtagatattgtttttcatttgtacaaacccttgatttatacataaatttaaaaccatgataccagtgccctgaagctcagtgatctaattgtatcctcctgtttgacagtgttgaaattccatgctcaatgcagttcatgaataactagccacacaaactgagaataccatattgggccttaactgtatgagatttcttttcccttttaaatttttcattgtatccttacccccttaagtctttatcccaattgtcattgctttatcttctttatagcacacacacacacatatatgcacacacacacacacacacacacacatacacacacacacatatgcacacacacacatatgcacacacacatacacacatatgcacacacacatatgcacagagagagggggggagatcttcttgtgattgttatcactcggtcgttaccatgttgtcattggtaaaatgtctactcatacaaatcaagaataacattccagtaaacacaagaagtttgcaggatgaggtgagtttttataaattagaaggtcctagtgtaagaaatctgacttgtacaaagagcaaaatttaatctttcatttcaaaaaccttgtagtataatagaaggattaagaagtaatttgacaaaaaaatctaaatctccaattaccagattattaaataatacattcaatgaaagagtatcttgtaaatattcaaaatataagaataattgtctataatccaatgatttggtatgagtcattattaagttgctaaattgttttggtatccaactgagataataactttcattattttgttgctataaaatcatatgtgattattataacacaaatctatgaaaggttagaagtgaggctgcctggcagctcaccatccatagataagatttctgctaacattattcctgttgccacgtgttagagcttgaacataaacatagtcaacttatattagtgtttttatacagagcctttacctgctggtcaatgttattggatattgttttaaagaacttcaaatctctgtaacatatctcaagttccttatgcatgtagaagagagcttcattcttccactgttatgaatagaatttggtgttcatttatggcccttttctttggattcattcttagatataggatcacattatcaaggtacattggcaggtttattcttcttcatccatataggtcaggggtggttgttgttgttgttgttgttgttgttgttgttgttgttgttgttgctttggtttgctttggtttggtttggtttggtttggtttggtttggtttggtttggtttggttttgccaagaaaaaagcaccaatttaaaagaatctttcaggctcagatttgcatactctgctaagtgtcgtttgtgatactccacagtaaagaggaaccaaagtatcatgttagcctgcatgtctctgtcaacacctaattgcactaaaggaactcagaagaaactggttaacaaggtggtttgatctataaaacactccttacacactcatgagaaacttacttagaattttaaattaaaccaaataaaaagataagtacagtgccacaaaactatagtctcagtgttggggagcaggagactagagggtccctggagtctgatggctagtaaccacatcagcagctccaggtgcagagagagatggtgtctcagagtataaggcagagagcaattgaggaagatacccagtgtaaaattctggccttcaaagatgtatgcagggtgagcacagacatggacatgtatatacctgtactatttatacatacatacaaaagaaagaaaatgattttgtaagaacaccccaaattctaaacacaagtttgcaagatcctaataacagaaggtataaatagtggtaaaatgatttagtctgtgtatgactagagtgtgctcttcaagttgtcttctgacctccacataggcaatgtggtacccatgtacatacacagagtaaatagtaaataaatgcaacatatatataaaagaagaaaagttattttgcaaaaatatgcaaaattacacacacacatatatatgtatttatgtatgtatgtgtgtgtgtatgtatgtatgtatgtatgtatatatgtatgtatgtatatacttccattttctctcttagcatataacatataatatcatttaaaagaaaaccaagtagaatcaaatgacagattgatgtgggaaatggagacacatacctgttcaataaggataaagagcttttgttttcttttttggagacccattggttagaacatttcagttgaaatgttcacaatactctgaggtctaacatttttgacagttaaaatccttcactgtttgcgccactgcccagctgttttccagctgtttattgagataacatctcagcttagcagcacttttccttcagtctacatgacttgcaccaaggcctctctgttaccgcacccccaccaccgactgtcacccccacctccacctccacctccaccatcaaaagagttcaattcttcctttccgtgtgggaagggaggaagagattcagctgatctatttggaagatgagtaacaagtttggtctttggaagatgagtgacaactttggccttaagaacctaacagcaaggctaaactgttgaaaaatacttaaagaggagtgacattaaaataacagtaataatgactgttcattcattctgagcttctgaggaaaatattctattgagctaagactggagttgattgagtagaagagagatgtgattgtggtcaccagccaccctgttttccataagttccatctataggaggaacaatgtagaataaacttaactcatctttgttttatttcccaaagagtccaagatactggctggagatgcaagcatgctcaccgtacaggagcagtgtgcaccaactaggagcagtgggcagctgtatgtgctagagatttttttacctggagatgaggaaacttttacccatctaaaacaagcattgattttatttcctacatgttttggtactgacatatagaaagctaaacgtgatacctcatgaaacaaattctaaaaatataaagataaaaataaacatgacaaattaggttggtatgacacatgcccatgaggtacacagtgaagaccacttatcaacatttaataaacacatggctctttgtagccttgaaaactgttggtgaaattcatttctgggttcatggattaaaagtaattaattaccatttgaagtactattcctaaatgaattacttcggtgtcattcaccgtatggctcagaaataatactagtttggtgttcagtcagttgtaaaagtgatttttaatagctgggatacaatggctctttgtctgtagttttagttctccataaagccatcctggggaggaagaatcttattacaattgcttgattctttttaaacaaacctcaaagttactttatgagcattcaaaatatttttcaagaaacctaaaagaactgattttcttcttatttttgaaaatacaataaaagaatatacttgcaaatcagtcactgagaatttgttttatataatttacatcaaagtatgaatcattcttaatattcatgttatgaaaaacaatatttcttctcattaagattcatcatgctatcaaagtatttttcatatatgcacacatatgtgtgacatctgttactataaataacaaactatgaagaaatggatttcagaaggatcattgaaatagaacttcatcacactttacaccgaggtgttccaaaatcatgatgaggagggttaagattccttctctagcctagatctctcagtcttttgtaaaaagatcacaatgattaataaacataaatccagtgttcagtgaccactctcttttcaattcaaatttatgctccaactaaccagactctctgatgtcctgttctataattacagaaattatgacctcatatctgattgagcaactctcaatcagcccctgagctctaatgatttgtacaggctaaattgtcactcatccatacattgatccatccattcattcagctaagtgatttgctggcatcaggtttagatatgggcactaagactgaagctttataatgaaacagtgtgcctaccagctagcattttgagtcgtcactcaaatatattttgtcttaaaagaagaaattagactaaacaaattcaccttgggcttctgcctcaaaatccccatgttcttgggacctctcacttgtgtgtgaatatttgcagactgttaaaaacaaatgcagagagatatctgtaaacttaggcaaattatttcatttattagggcttaacagacgagtgcatgaggatatcagaggagactaattagcattgatatgatgtaaataacattgatgtgatcagcatctttatttaaattggtatcctcatttcagttgctatgcaaagaaaggaagaaagaaagaaggaaagaaagaaagaaagaaagaaagaaagaaagaaagaaagaaaggaaggaaggaaggaaggaaggaaggaaggaaggaaggaaggaagggagagagagagagagagagagagagagagagagagagagagaggaagggagggagggagagagagagagaaagagagagagagaaagagagagagagagagagagagagagagagagagagagagaaagagagagaaagagagatgtaacatgtaaaacagccaaagaagtgttggttggaaataccaggatactaaatcatttggggaaattgtcatttgccccaaacagtaactgaacatgttactaactaaaattttcactctacagtagggaacccaagtgtatgatgactgacctgtatcagacttgatcatttctaatgtcctatttccatttccaggtcatttgttatattttattatattgtaagtttggtggaaaatgtttatattgatcaccaagatgatgtgatgaggcttcttggttctttaagttgagggatgggcctctcagtccctatctccagccactgtgcactgtatactcagagggactgcactacactctccataggaatataaccaggctgtttgatgactgtggtttcacggggcaaatcatagaatcaaagtaatccctgattgatgcttttctcatcttaaaataattgctccttctgcatcccacttttaccaacaggatggggcaagaggatggcatcattttataaaccctgtacacagtggaggtgtagctggcaccatcccagcgtttctgttctttaatgctcattgccactgtaaggcttctcatcccgacttgaataagaagcttaagaccttcctttgtcaccaaagtgctgcttgtaagcaaccattttcttgattgctggtcacccactgtagagcacaggcaccataaagtggcttccattgccctgtgacaccaggaatctagcaagggcaagaacttcagaagtcttgagacattggtcttaacccagagagaaacacttcagcatgttccctgtgaggaaccggagccccaactcatccattgagttctaggatgtgtgtagtgccactcatgggaaattaacccacaattattaacagatttgaccaaatcaattgaacagtctgtagcagtctgtatcaactacttagagccttcccttcacaccaatcatctaacaagttgtttaactatctttagctttcttaattaccaagctgatttagaagataaagtctttaaggtcagaggctgagggagccaaatccccagagcatctggaattgggaagaagcaggaatatattttaaacaaagatctcacaactcagaggaccctagccatgtgctaagaggcagttaccaggcatgcatgggagtatgcattctatgttttaagcatgtatatttctctgagcatggtagtacacacctgtcgttccattctctcaggagactaaggcaggaggaggccattggcttaacactgaggcacaaagtgaattcaagtctactttgtgcaactcggtcctcaaaattacaaggagaaagagggctggagatgctggaggtgttgaagatgctggggatgcagctcgattacagtcctctctagcaagcaatgagctcctaggttcagtcctcagcaccaggaaatacaaacattaagaatgatttcatattcccttttggtgtgaatggggaaattatgtgttcaggagccaccaaaggcccaaacagccaatgaagacatcaaagcaaacactgtgtgtgttggtgacctgaaatgtttctgtaagttcattcatgatgatcaacatgtagcaagcgaggttctgagttggaaatgacaaaaggtattgtaccccctgtgtagagtgacatgttagtgacatgttatgacctgcctatgttgccagcaattctaatttcacaaccaagtataaagctttctttctctctttctttttttcttgtcagttaaatgccactgtggggagggaaaactcactacgaactaagtttattcagatgggaaagcaatacttccttttattgatatgttttactttgctggcagaccagagcaaaggttttgtgaacatttaaaagatgaaaaaagtgaagaatcccagaagcggtttatcttgaagcgagataactctagtattgataaagaagacaatcaggttggttctcaagtttgagaatggctgacattgttgtttttgaaggtgggctggctgatgttcttgttgcccctctgttgtcccctcctgcctcccagtcctaccctctgcctctgacaactactgccctctctccaaccccttggcctctattgcctccccctccagcattcaccgggtagccacgtggtattgctccagttgcttagcagtggctctgtgttgggctctgcatgggtggtgcttggcgcagtctttgctgcatgttatggtggggggtcgggatgccgcaagctccagctgtgggggtaagcttgtcagctgcatttccagatgtgtgtgtaactctgccagtcgctccactccctacagctctgtccttccgttgtgcacaatttgagttggattatcactgaggaccgatgagccaccggtgtagctgtaaagaacataccttgttatggtgaggacaggaggattttgcaactatcctaaaaaaatagtcttcacagcaaagcatcgagtttctgttctagtctcccacccttcttcccatgttttatggtctctgtgatgcgtttgctcgtttgcatgaagtgtagcaaaaactgattgctgtgtattttgcctgtgacaaacactacgccattctagaaagaactttaattgtggtccttgaccaaaggtaaagagacattcctgcatctcttctctgtatgggtacgagggagagggttacaagcaagaaagctaagtaaattataagtcccccccccaaaaaaaaaaccatttaataacaataagaatttcagaaagccatgggaaagtcttgacaattgcacttgctctctgacaatcaatataggtatttttgaaacatgcctttgctttagaatacatgaaggtaagacaatccatctctcactcaaggtctcctgctaattactcaacgtgagtcactctgagccggcatatgcatctctaggtgcgattattttaaagagcctgttccttatctgtccctccttgtttctcaccactgctgacaccagccctgggctacactggggctcttgttgactccaaaatatgcctgtgtcgtcgagtactccatgggtgtctggtggacgtatggatgaatgtgcttagtgcagagaggatcttgtccacaatggcaaatgctatgagggaggcagctgagaagtagggcttgggtcaggggaaaggatgaagacaccgttctcatgctgggttctttggattgttcttttagatttctctgtactgaccattaccagcaaacaggctttctaggctgaggttctgttctccatacaattcacagggtcagccactgagtgaacaaaaatggcctcggagccaaggatcatccagagggctctttcaggtcccctatttctctactttcttgctctttcctgagatcccaaatattcacagccactcccccctcccccacccaggtcccctgaactcactcttccctcttttccatcaagactttgcctcatgttatggtcagacacactcagcaaaggtaaaagaggttacttctggccacgccagctctgggctaatccctgaagcatatgcaagcttgcttatttttgaaatatgcattctactttcctccatagagaatgaaaccaggagttgcaaatcctttctatgctagctggtcacacacagatacacacacgctcacacacactcacacacacacacacacacacacacagggatggatagaggaagaaagagagagacacatacacacatacacatcacacacagaaaaagagatacacacatgcacacctacacacatgcatatatatgtacacacatgcatatacagagagacatactcacacatacacatgcatacacatatacactacacacacacacatgcacacaattgaatgcatgtgcacagacaccacacacacacatgaatacatgcacagtgcacagggatatacacacatacacacaaatctatgcctcccagcctagacccctcagggaatgaagggggtggggcttgccaggctctggttatctcgttgagcatttattattctcagctgatggttgcttcacagctcaccatggataaccctcctgatttcttttctctgttcagcagaacagaatgcacccatttagagatgacagacgaagtaaatcaattgaagagagagaagaggaatatcagagagtgagggagagaatatttgcacatgatgtgagtagttgttttaattgcctcttgagtatggtccttccatcagcagaaaggcccctcgttgctcggacagagatctggcagggagtacagaggctgggagcaaggaacgagttacaaagcaggaaacacaaatgtttctgggagagaacctggttcagggatgcgttgaaacagtccaagagtctgtgtatgtgccccccagggcatcacctaccagggtagagagaggtggtgtggatcagtaaaggagacagcacagaaagggttatcaatttctgaaatttctttacatctaggtagcagatcacctataagtgactttttaaaaaatatatatatatatatgggtatgaggggccagggaaagggctccgtgagtgaagtgtttactgtacaaacatgaagagtttggtttgaatctctatcactcttgtaaaaggcaggatggggacaggcttctataacacaagcactaaagaggtagacacaggtggatcctaggagctcattgaccaaccagtccagcccatctgcaagcctctgcttcatagagactctgactacaaacagtaatggagagagcaacagaaagaggcacctgatgtgagtctctggtccccacacatgcacgcaggcatacacgtgtgtgtacaccactcacacgtgtgtacagatgcacacacatatgcacatgcacacagtgcaaacaaaatgcctttttgttaaaaaaccaacagaatccagaagaagtttaaagcactatgtgttagtgtacactctttctaacacaaaaacacacatacacatacatacatacacacacacacatattatttagcaaatattgacacttcactatgaaaatgctagttgatttcagggcaaatcaaatttatgaacaatttgccaagggaatattcactaaacaacttcttttttgttgttgttgtttaaaaaaaaaacaagaaaacgtgattgagattcttttttattttatttttttacccattatgctaaaaaccaaaagcaattaaattagataaaaacaaaagtgtaagaattaatagctgaacatcaaggcaatgggttaaaacatcaagaaattgccatagcttgctcttctatgaagtcctcaggagtttccttgggtgatggggaaccagaccctgacagcagtagaggaggcttcggtgtagtcctctgtggtcaacatttcccgtactctcagtcaggttaaatatatctctgttgcagtggcctgttgcttggggacacagcaagccagctgcacacattgttcctcactttagcaagagtcagcatcccctactcagggcagctcttgaagctgcaaaacagggaacacctgccctgctggttttattcttacgcgttcccaacctcacttgccttgaaaacactgaaatggaaatttaacgattcgatactctggtccagagctcttaaattaggagagcacgggagaggaaaatggaactggaggtatggttgcaagtctagaaactatgagagagcggctaagactcttaatatggttagaacgtgccatgatgcaaactctcactggataagagaataaaatgactaaaacttttgaccttgtcctgagagggcaagagtacatttgtagtttgcggggggcagcccattcacctctgaagaccttcatacgtgtacttatctatataccagaaacgtccgctcccactctggttctgactaatcaaatgtcttaggaatgtatcaatatgttgagacacaaatgctcatcacacagacatgatgtgagacccctgttcttgttattatctttataaagttatgcccagcgaacactgtctcagatgcctgtctgggataagaatggaacccataattcttactttcacaggaagctggccacacggaaaaaggccctgcatggcttcccttcactgggcacaaagacagaggaaagacttggggcacttctggccatgttaagttttactggccagaatggatagcatttctttcacatgaaaagaagatctaagtatgccagggcttaggtgccaagctattgccagtccctcactaacccccgacccaaatcatttaccagcctgctaatgcagggcagggttttaaaatgagccttcttcagtcaaaatacactcacagacgagactccataattgagtgacactcttgatatcattagtgaaatgatgtgtttctaaggggaaaaatccctcccattgttcaataccttcatgtaagttctcatgatccctacaagcctaagagaggaaaactcatgttcgctggcattcccttggcccacagagacagttttgtctctggcaagctgtggttagctacttgttggctgtgataaattatctccaaattttcagcacaaagcaagcctaatctgcttatgacatcctcatgtctgtgggctaggcctctgatgtagcttggagggcaatgataactcataggctctaatggaggtttcaattaaactcttagctgggccttgctcctgatgatttggctaaggaattgttagctgtttccagacctgctcatgtggtgacttggagggcctcccttgttcactggaaccggtctgtagtttgcaattttcttgaagggtgagcacccctggacattgttgtgtgtctccagaaatggcagctcacttccccaagggaatgaagttcacgagagaaatggaagcaacagttgcccatgatgttatcttagaagtggccattcccctccaactttacactgttagacacacagataatcctgagaacaatgtgggaaggttgtgagtgttcaggcacgggagatgacactagattaacaagatgtcaccacaacatctatgaactcaaaatttcaaggatgtaacatggccatatgaactttcttgaataatatatactgtgacatatcttgctcaccacttcttgacagactacttcatgggacattcatctatgcacctgcagttcccaagctgataggtcattgtcacccactcaagctgttgaagtacaagatcatttcctacacaataatagtgatttgtcattaagtcaactatttaaccaatccaaaggatccagcctaaggaccctgtgttttagaagtctttaattttaattattctttgattttattttcttatgattaaaaaaaccagaattaacaaaatcaattttactcatcaattatcatttatgtagtgggtattcaaatatttagtatgtgtatatagttccctacctgggctaagaatagaaagttcagcctttagcaagattcaagcttattttaaaatgagaaaactttttgaatgttttgagcaatgtgtctcagatgtgcgagtgtttgagaaacgatgtgcatgtgtgcttgtgtgcacgtgtacctgtgtgtttttatataggtggtcacatgaacaagacaggcatgttgccttggtagaaataacttcaaacatggcttccaaagtttggtaccttgagataggattgctgagagcctaatagttgtaagtgtacagacaaatttagctctcaaataacaaaccagtatgcttctattgtcagtaagatttggataaaatgttatttctttggtgagaatttaacctcgttttctggtcctttctacctgatattactaaccttgggaagactggttaataaagcaggatgttcaagaaaggcctgtcttgcctggaaggaattttgctgaagacatttctgtgttgataggtttctaagcaggctcctgcttacccctccaccatgtgtggggtctgcccctgagtggctgagagggcacaggctgtgagcacagtgggggtgggatgtgggggagaactataatccattaagcaaaatcattttcttctttgggaaaaaaaaagaagccttttatatccgggtatgcatataagtgacagctttaaatgttgtacttaattactgtgacacttttatctctctctgccattaaatgtgcaagttattaatactcccttttctaaagtttatttctcccagctactgaatcacatcccgtagctgtctcacttatgccagtggggggaagggcctctggtggggccgggatgggggccattttggaggaactttctaaacatccagaggtatactctcgaaggatatttttgttgatatcttcgatttgttgatgtcctgctttttcattcgaagaattgaaagtgtttagtctctcctcccctcaaatggtttgtagttaagaactctgaagatcagcttccttaaataggttgattctccaatccaagtgcctggtggccacactataaagcccactgacttctttcccaccatccaagagactctatgtcgaaacagagtcttgggtttagtggaaagaagtgatttcattgtcagaaaggaagtgggccactacctggcttgcctctctgagcgttagcttcaggaacctgcaggtttaagctaaggagttgctcacagaggctggggagatggctttgttggtaaagcaaagaacaggaacatgagtttgttcacctcaaacccaaccaagaaaccgtgaacaatgaagccacgtgctttcaattccactgactcagaaacaggtggatcttggggtctctagccaactaacctatatttcttggtgagttctaggtcaataagagaccctatttcaaaaataaatagataactaaataaataaatcctggtggaggtctgtgagatggttcatcaggtaaaggcacttgtcaccaaaccagaaagtcttagctcaaggcccaaatgcccacctggagaaaggaaagaaatgactcctgcaagttgtcttctgacagtcacatgtacgctttgaaatgcacacatacctacccatgcatacacacacacacacacacacacacacacacactcgagaatacaaaataaattataaaccaataggacatgaacagcctcttagaaacaacacctggacttgatttctgctttccaaacacatatgtacccgtgtgcacagacgtatactgataatgtacacatgtgcttaaagaattgagagtcattattatctctgtagtacagtaggcctgttaggtccctatttatcccctttgtagctcacgaattcatcttgaaatctatgcacagaagatagcacatggatgaatagacagatagcacctaaccctgatcttggttttgtattgttcccaagacacaatgtgcagtcacataagcatgtgcctctttctttcttcaagtttagcctgatccaccttttctcggcagattaaaagtagtagagtttccttcccctgagttggctccttaagggaagtaaaacaagagagctattggctttctctgtgaagcaggaagacaaaccaggcaaaagtcgcttgacagcattttctaattagattaagctggtcaatgcttgtcttctgtcctgactcctaccctcaatttagattaacaattaatggcatttcttcaatgctgagagacttgtagtagagagtgtgtcacagaagatgtggggcgttcaggattatgcttcacagttctgccggccctaggtggaccctgtcaaatctgcttatattgtctggatttgaacctgtgccctcggttggtgtaagatgcctctcaaaactcaacagtcacccttctctctcgacatctgactcatctttctcttttgacctttatcccgactttggactttctctgttcatcttcagagacttcctcaggggcaaatgccttgtgctgctgtgaactggctaccctgtggacaacactaacctatttttctcctttttaagttctcctcttttgtatgtaattttcttaatcttttccccaaggaagggaaagtagttttaaaatcaggcaaggatttgagggatttccaccaatcctgcccatctgacatggtgccttttttatctttatttttcagtcagtttgctcacaggaaagcctatttttggacaacaggtaaaatgacatttatgtttcttgtgtcttcagaggaatggtttgtcacgtgtcctctacattttcatgttcatatgtatccagtatataagtgtgtgcctgaatatatgtatgagaacatgcatatatctgtgtgtacacacatatatattcacatatatgttacttgatttgtttaaagcatttgatttgaggaagcagttatcttggtttctttcagacaagagcttaagcagttttgctcaaagtctctgtttctggctctcccaaagatacagtccccttgacaagggataagagtagagacccagtggacattcagttttgctggcttcttgaccaggttgctgaaagtatatttcgaatcattagccatttcttgggtctcatcactttaaatagccatgccatatatatatatatatatatagatagatagatagatagatatagatatagatatagatatagatagatatagatagatagatatagatagatagatagagatagatagatagagatagatagatagatatagatataaatatagatgatatagatatagatatagatatagatatatagatatataatttcaaattgcacagatctccctatcttcttgaaagtgctgatgtgaaacattctttaaaatgctggcttttgtatttatcagtgcagctggcttaagcctcagtgagggaggtactggggaaatagagtgttcatggattttgtagattatcttggggttaagggcaaaccatttagacttaataccctttcaaacagtttgaaactgtcacaggtatgaaaatgttcccatgattctattatgtggattccagacaaaggaaggaggtggcatgagccatgctaacatttgattaatcaaaatctgcaacttgatttagaaagacgggattcgtaaataaagcaacaggttaatttaatttagggtgtcagcataatgggtgaccctacgagtctgattaaaattgaagctcattaaatgctcttactcagtatttaaactgcttatcagagataagtatcctaaaagatgaaagaccactgtgttggcagttggaaatattgagagattcgcctcttttgggtaaaaggaagacagaatatattcatttcaagcccatacaatctgaggaccaactctccatttttagtaaactgagagtccatcattggttaccttggtgatgtcctgtatcaaaattttacacccacaccagaaacgttgaatagagacagtttacttccataaagacacatgtcagagtcctctatctaaccaataatttctctattccctagtcctattcattgactcataaatgccctagatatccaagttgaatcatattcagcattataataactggccatctctgcccactacctgtataaacatgtcctaatagtccaagaaggaaacatccatttgaatgtcccatcataaaaaataaatagtataatgggcacttacttccggaatactgatatttccagtgaatcaaattaaataactttgcagttatcttaaggtaaatctcaacacaccggtttaattaaatttctatcctgtgtctaccagcctcttctgttttcacatccctcctcttgcccctttatctagcataggataagggtctacaatagttatttgctgctgtgaatttattcatgcaaacctttacatcacacaagtgaatcctcatgtgagggactgatttccaagcaaggcatgctccggtggagtgtgcatcagtactgcataggcgtctcatacccttaggctttatgtcgtaaacatggtgtttttcattcccagtaggctccaggaagacatgcacatatgcaatgagacctataagaaaagacagctctttcggttggtatggtttactttcataaactgtgttttcggatgatgtggcagaatccgtgtgcaatataagtgttagtatgcaacatttctgttcatgaagttaaactttgttcagttttcttcctgtagcgtttgttccaaaactggacagggcaagaggtagcactggaaagacatgactttgtgtattcttcttctggggtcttcctacgaagtaccatttattacatggaggattcacggtttaaacctgttgaacacgctcaaacttaccttgtcaaattaagccgagttaagatttccctggaaggctacaattcccaatcctggaaactaaatcgatgataactctgttaagatggctggtttttaaatgactattgtctatcatactatttcaaacatgattttaagcacttatttgacttctaaaaggaaactttgaagtttcttcaattataatggactatttaggcaaagatttgtggcgtgaggggaaggagttaattattttttgagttctgtgctggactaacagctcagagagccagacctgttttcatcactttctgtctgacgtgtgttataaggccagatgtaaacagtgttattaaaaccactcagtatcaggtcttcaagatggctcagaggataaagttgctttacaacaagactcatgagttcagttccatccccaagacccacatggtagagagaaccaaatcctgtatgttactttttgacctacacacagaggacttggtacacacacacacacacacacacacacacacacacacacacacacacacacttaaaatatattcagtagttattgtgtgcatattctaagtactaggaagggttgatctctgttagaataaagataaaacaccaaacaccaaacaaatttcaaagaaagaagagaataaggaaagtgaatggatttacaaaaccttttgcaagcagtttgaattgagatctttaccatgagtggaggactcctgttccctcaggcattagttgaaaaggaggaactggggtcttgtttacttgcttctaactttcctaggctgaacgttgttttcccaactcccttttgcatcattaggtcctctcctttttgtttctcaacatttaagtgatgaacttgagttttctttctcctggaaactcagaccctgagctcacacactctgatatggattcgatataagcctttaaagagccagttcctttaacacaacccccaagtcacctcctagcagagctatggtataatcagggaagccattggaacatgcagcctctcacttaccccaggcactaagtttcagatgttacggcacatagatcattgtaaagtggttctgagtacatatctaacttgtaggaaacaaaaaccacaatgttcagaagtaaatgaaagtgtcattagttatcaataagcaaaggaacagaacaaagtgcgtatttgctttatgactgccatggaatggaatgctagttgtctatgtaaatctccggtgacattattttcctacacgcttgttggaaaggacaaaacctaacttctcgggggcgggagggaggatttgagtatgagcttttctgtagcatttatgattccataccgagtagacatgcaattcatttaggaccccagcccgccattactgggataaacagccaggagacagagaaatgagagttacatttcaatttgtacatatctagaagccataaataattatgtatcttaatttggattctatttatggtatctcctaaaagcagaaagttaaattcgcccccctttaaaaatctgcatagatcctgacttagaatgctgattggagctgccaccaggcctggggagggtatctcaggtcactttatggatgaggggagataggttaagtctagatgagcttatacagttgctggaaacagttctaccatgccaaagggtgtcaactacgccctggaaaaatggaggttatcctcctttgggaagacagtctcagccaccctggaacttttacaagcctggattcctgtcatggtgggtgcagaagtcaggtggaagggagaaacgaagggaaattggtgatgggagaaaggattgcccccactgggggtcacattctccttctgccatatcctgcatactgaggctccagatattccagatcatctactgaggagattgctgtcccatttctaattcagtgatagttactaagagatagcttgactgcacttcatccgagatgggccaacatgatcagaattatacaagggaagaatgcagttgagcttggatgttggaagaacagactacactggacaacacaagcccttgggaaggctattcttctacaacggccctaatagctttcttacatttctaaaactgtgtcaattaaaggcacctggacattggtgagcatacccccttcctacatcaggtctcctctcaggtgcctgttacttctgaaaccatctttcccccgaggttctgacagtagacatcataaggaaactttgataaggggtgtgttcatcaactgtgcctcccgaaaatgcttcttatcctctgatttctctatcccaccacaccccttgccttcctgttggtcttcactagttctcaaatccatttcccctcttaatcttcccaggcacagacaaaagtttcctacgttaaaacagaggctctgctactgctccgtgtgccaagagtgtttctattagagatctacctgggctcctcactcctcaacggggcattattgacttacagagattggttttaaaccaagctttgatcagggattgaggtctgattcatgcattgattgcatcacatctcgtcctgatgtgaggttgcaaggtacacttattacctgtgagttatgtccccttcactcatttataccacaggaaaagtctagggtactttaataaaacattatttcagcaggggggagaaaaaaagctttgtaaatatgcacaaatttgttgcttaaggagactgaaaaccagtgaaactacaaatttcttcacaaacacatgcaaacctccatacctcttaaaggaaatctgaggttccctgccaactcagctttagctattgggtaacttccattatattagatacattttgaatgaatgtgttcattcacttcaagaggtttttgaaatttccactgatgctattggaaaatctcaggtcaacgtatagcgtcaggctgatgctttcatgaactgttctccctggtaaggattaacaagctgtttccttagaccactgaggttagagtcacggacaggttctcagcacgagttcatatagaaattccatgatcactcttttgttaaaatcttgctgaacaaagattatcatacaggacccaaagttggaaaatgaattaataaatagctttcctccaaggcaaattatttaatgctaaagaagaaaaaaaaataagttctttcctgggaattatttttagaattatgtaagatgataattacttcggaacatgaattcattattgatttgagtcaggagagtgtacccactttcctctcggagagagaagctaacaattatgttttatagcacttgtctccaactgtgtctcctttactggcagagggatcatggtgtctctaggtttggatttcccatgtataatgtgtgccatgtgtcatatgttacgtgtctttgtgtcatccaggtatttgtaacactgttgggggcgggggagggtgttaaagcggtcagcgaggaaagtagaggtgactattctccgaagggctcctctgcccacccacactgtcatgatgcataactctgtccccatgaatctttctgacggctgtgcagggctcaccgagacagctcaggaagaacttccgggagccggcagagcagctcagagactgagctcaggtggccagaccaccagcgggcttggagcagcacagattcggacagttccaaccgcaatctgaagcccaccatgaccaagacggcaagttttgggggcatcacggtgctgaccaggggcgacagcacgtccagtaccaggagtgctgggaaactgtccaaaacaggtaggtatttctaagagggtccacgccctggtgcctcctggattctatccggaccatatgctctctgtttctcttgactttgaattaactaatggcaggaatagtaattccactccatttaaggaatcaggaggtgttattgaagtgggtttttgcatcttcctagctagccacagacttgaagcttatccataaacttctttctccttagtttccttcctggtaaaatagatgttatcagatgttttatgaacccagtttaattacttaaagtttaaatgacataattttttttaaaaaaaggtgaaccttgataaatacaaataacaattatttaacagaagttagctactgcttttaaatgtagtgctatgacatatttcttatagctgccttgtaaggtcattataaaggtaatagatttagctcctgtacgagtacactgttcctctggtgctggacctgttattacttaaattatgtgtacatatttcctcctctgagatatataaatgctaatatcttcacatttaatcgttatttggaagacaaaaaagtttcaatatatgcaaaccagtttgcacacgtagctgacatgtttcaagggtcttgtcagtgcacacttacatttattgtgtccatgaaatatttgtacccctaatttgcagatgaggaaggccagtctctggagtgtttagtgcagtgacactcactaaacactgaaaagtgaaggtcgcttttttgcttctttatgatttctgctttattcttcctctcggggaacagtgatattttgagataaacaaggaacaggcaagatgcttagaaagtggtgatgacgataaacctagaaatttctctctctcgagccatggctttagaatgactacaatcgctctcagcagagaggacggctccatctgtgaagcacaagggctacagtttgcccagtaaagagtgggtctggtgacatgtgctggtccctggggctctctgtagccagccagcttagctacttagtgagctccagaatgttgggatacctgggattgatggagtggtggatggtgcctgagcaatgataccagatgctgacttctcattcttactgagaaaaggagatggggggaggggctaggggacaagaggcagggcattgtcacttgaactgtcactgagacttaaactgtaattccaacaggacctgggggtcaggactgggatatagcagtggaaggtttaggctgagtgtagaaaaccccacttgaaactaagatatctttgccctgcactgactgctttctagactcatgctgactcaggagagaaggggtttgccccaaaccaggtccattttgctgatcatttagcataattacgttgttgacaaattcctcctaggaaattatctcatgttttcctacacagaaggcaaattaataacatttattcagagacttcactctatccataccaccgagctccttggagagcgcaggtgggtgggtgccctcttcctgagagctctgttcactagctgttaagctcttgattctgactctaattaattgctcttgtatcccactatcacagcatctgaaatccacacaagcagcggcagtgcacttgaactcttgtaaactaagaaaggttaaacagtttcggttcttaagatgctgaaaccaagtaccttaaaaggtgcacttaaaaattccaacaccctgaaagggctcttaccattttaaaattaatcaccattttccacgcaccaagcccctgtcacttccacagcaaagctgatcggaagcatttaaaatacttcaggaacgggagaacactactctctttggagaaccgttagagattagaatgcttcagacaggttttttttttttttttttttttttttaactttaagtgtctgccttcgaaagcttgtcaaggcacaggcatggaaaggagaaacaattttttttttttttaaataaggagatcaagagaggatgtcaagacaatcttaaacctccccacggtggttctctgaagtaaacctgccagtttggctgtcgtgagcatcagaacaggtttctgatttattttctaattggtgtagtaaagttgaaaacttttaaaagtctttcagaaaccaatgtgttttctgaaatgaggtgttcaagctttcaagctgttctcctacttgtgaaggttctggctctaactgggtaatggtgagactttctcaatattggagatgctcttctacattagcgtgaagcttataacccaatgtatacatgcagtctcttgagtggtttgctggcagcccagcccaagactatggaggttgaggacgctgtcatgctgactttgggagcaaccttgtggtggtccttatgcttcaggcttgttgtccccttgagactggcaatgtggctgagtgataagcacacacttcctgctggctctgcctcgggctacagtgccttgccattcgccccacgtggttcagccacacagcaatgctctcagcatcatcagagatgggaagtctagtgacatcacacgtcacgccttctccaaggcttttgagtcaggaggtgttaaagggagcacggcaatttgcctttctagaagtttccaggtgcaaactagcagttgaggcatctcccaatatcctttgaaataacctctccaaagagataagccaccctttcattttcataacttgagtgactgcacggtttcattttctgggcgtaatccatcttccccactgactccatgccgacctccgaggattgtttttgatagtctaatattaatcttaataccctatttttaatttttccaactttactgcatcatacctcatcttcccactaccttatcctctttattttggttcttccaagtgatagcctgggtgttagctttctcctcataattttggaagttttagatcactctgctgaactctgaccctctgaatctagaaatactttctagagttattaactaagaagtaagacttctgtgccttgggaagactggagaagactaggagctgctatgtccccctggggagtaactttgattactttatgcatcttctagaacttgaccaagcttgatcaggtggtgatagaggggagaatagtcattaaaatgaagccttcctgagtcctgtgattattaattggtgctaactggtgctaacctaattggttctgctcttgccccttgattggaaggtttggggacagatcattattagatagaacgctgttatttatttgctcattccttcacattttcgtggacatatataaggtactttgactgtctctcctttggcctctgtcatttgccttccttcccattaagcttctccctcttaatttcatgtcctgactttctttttgcaccccactacattgaattaggattacttacctgagcacgagggctgctcgctgaactataggtaacttaccagtgcttacaccactagaaaatacgagcctcctccccaaggtacacattaactacaagtcctcaaggaggagagggggcccatgagcttctcccctgcccaggatgggatgccgactgctatacaatgctatacctaacattgtataggtcttatgtaggtaaccacagcttctgtgagttctgaccttaatggagctgaatgaagagagggacgaagctttgatgcataatatagcatgtatgagccttgaactctactctagctacatcaaggaagctgtctacacatattgtacaattgcatttatgaaaaatattccacacagacaatctaaaaaggcgggttttagatcagaccttagatcagagttagagtaagggcttggacctgtccatcactcctaagatctcctgcttcctttggggaaatgagaatgttctaagacgggataggagtggtgtttgttctgctccagcgatatgctaaaagctattagatcccacattaggaaagatggaattttatgatccataaaatatatatcaattaagctattgtagtgaacaaaatcatctgaagggactaaagagctttaaattttataatgtagtgccactgttctatcagtcggatatggggagtataagtgtgtgtgtgtgtgtgtgtgtgtgtgtgtgtgtgtgtgtgtgtgtctgcctgtcccgctgtctacctgtctttgtctgttgagcaattgcaggaaccatattccctctgtctgtccccaccctgtttatcttcttcctcttctttctttgtcttccttctcctcttcccccctcattctccacttccttcagtctctcctcctctgtcccctcatctttctcctgcattgtcctcttccttctctctatgttttacctcctcctctttcctcatcccttctccttccttctcttcctcctcctcttatttttcttctacttcttcaggtttttaagcacattagcttctagtcagtctaatatttcaaagcagtccaatgtgtcctgtttacctcttgtaataattgtcttgcctggtctacaaagtgagttccaggacagccagggctatacagaggaaccctgtctcaaaaaaatcaaaaaaacaaaaaccaaaaacaaaaacaaaaacaaaaaacaaaacaaaaccaaaaacaaacaaacaaactaaaggctccaaagtctaagaaaggcagaaaggctacaaagtaggtaatttacatcttaaagacacagaaagtctgaaaactagagataaagagaagtctgttcaaaacatggtccagtatgggaaactaagccatcttcccccttcttgcttccagtctgtctggatgcctcacagaagcgagctctgaggttgaggcaactgatgcgtcctagagagatgaggcacatcagaggcagaccggagctgaggcctcttcctcttgtgccttacctttctgccctgtcctgcctggttctgcattttgctttgctttgtgatctcccactcacccacatactgcccccaattctcccttgagggcacactgagtttctctgttagctgtcctgatgtcatctccctcttttgatccctaggagctgctatgtccccctggggagtaactttgattactttatgcatcttctagaacttgaccaagcttgatcaggtggtggcactatctggctgccacaggaatgacattgctgaatggggtgtgtagcctgcaggctcagagcttggacaatatgggagttgagtggcctgagtccactcagatgttgccacacagtgacacagaaaacctgtctgataagtccagtgcttaccacaccaacatagtgtttcaatatttgctctgccttccagtaagcccctggaaaaaggaagtcagacacatttttaacactgggaacctaaaactcttgaaatttcaagtatcaatttcaatatgagttaaacctttgaacacttgttgccctgtgtttttatcattgttgccagtgtctgtttttagtcaaatatatcagtggtatagctgtgtagactgtcgctctatctgttccagatgatcaaggcttgcaaactggcccaagcatacaacaaaggcaaccagaaagggcacctagcaatccctgtgttcctgtctaagtgtttatcagtttcttttttcatcacttggactgaatacttgacaagaagaaaattaatggaggaaatgtttaattgggcttacaacctgaggatatggtccaacatggaaactattatttccaagatgttcaaagttgccccaattagaagatacaagaaatgttagatccagatgtagctgttgtcctcagctctcaattctatacttgttctcctaagtcacccctctccttctggtaattggtttatttgtttgcttgtttgtttgtttgtttgtttgtttgtttaacttgtggctccaggtttaattccgagctacagctctttctaagcacatacaagactctggattcactctccagcatcataaaaataattcccactcatgtagtgctgtgttcccaacagaaatagtccagttctctaatcatagaggaaataaataccagtttgtatcagttcccttcaaattttgcctgaaggatggagcttcaagagcacacatgggccactgtgtcataggtctccttgggtggccatctctttatcctccaccctgttcctggttcctattggtctgtcagtctcactaagagaagtatttcttgtagcattaatttttcaagagatgggaatttgcaggcactgagttcgttgcttagaaatctcatttaccagcttacttcctagagagtgtgtgcaaaagctgaaggaatggttgtttttaatacccccttccttagaaaaactggcacacctgagaagcagaaagcaaaggtttccataaatacaagttcacaatgtggaggggacattggctaacctcatccttcagcacacaccttaaactgcccagtgtccccggatgaaggagtcagctttgtgatgtctaattattgtctctcaacttccctgggtaccacatgctctgttgattcccatctttctaccaggttctgagtcttccagcagtgcgggctcctcaggatcactgtcccgcacccacccacagagcacggccctgacctctagcgtggcagctggttctcctggctgtatggcctattcagagaatggaatgggaggccaggttcctcccagcagcaccagctacatcctcctcccacttgaaagtgcgactggcatcccacccggaagcatccttcttaatccacacacaggtcagtactgttctgctctgctggaaacatgagttattaaagctttattcctctgtttgataagtaaaattcattatcaagttttctgaaaaaaaatacttgggtaggagacagagtgtggggacaactttgcggtgactttggggaagtctggatttacagctatgtatgtaaatgcatcaacattcatacagatcaggcaattcccaggagtcacccctactggagacttagggctgaagccccatagtaaagtacttgcttggcatgactaaggccttgcgtttcattcccagccctgaaaatggagaggaggaaaaggaataggaggagaaggaagaggaggaggtggaggtgaagggggaagacatcagccggcagctgaggcagcatccccttctcttggtcccttttttcttggccatgaagagttttatcctcttctgaggacctaaaatgtgggtcagctgtgtcctgacctgggatatactaatcttagtgcttctcacactaaaggctcagtgagcctgcattacacctcaagtatttttcactcaaagacatttcaggagtgcagggaatcccttggattcctggacccaggttattatagacgattataggactcacccagcccctgcagagtaagaagaacccacatgagtaatgaaaataatgacaagcattaaatactgcctcgtggggataatagacccagccagcttatagtgggactgggaaactgtcccttccataattatggcttactccatgatgactgccaatttccctaggggataggtaactcccatcttaagacaaccctccaccataacccctgccgccaccaccacagagagctgagagtccagaatatttttagagctgtgctgtcaggtttagcattcagagtttgtcattagggattggaaagaagagaattctctgccaaggagtctgaaggttagctctggtgtatagagcattacttcagtaatctaagcttaaccagagagaagcagctgaacatctcacaagagtgattggctgggtctgctcacatggggtctggcaattagggtccttgcctcaacatgggaactatggcaaagtggttcctgaagtaactgcctgttcttataaagcatatggcccattctcagagcatgggatttgatggagacattctgaaagtaccataagttcgagagaacaaacgccataatcattttactgaaaaccacttgaaagcctaagactgggtacttctaaggggcattttctgaatggctcaggttttattggtattattgcaagcttcataaaggagagtgaaggataccagcaccgtacgcacctctctgggccctgactaaaggatgatttgattgttggtgtgaaagcttttgctgttgagtggataaagggcttgctggaaggagcccgcacagaacattcatttgcttgatttgctttaagcagaattccagagtgttcttaaaaagacacaaaagtatgttttgtagggtatcattagtaatggtagtgtggctttgcatatgtgtgtatatattattatacccaatctaacttatttagcaaagaaatagaattctgctggtgccaagtcctgattctcattcattggatggagtcacttgaggctgctatcgaaacatctcctttgagaaaggttctcaactagagggaaggcactgctgaatcgtttctctatagacctttgtctgctttgacacacgataggcgttgaactcttcctcacaaatgaccacagttattgtattttatacatggctgagccgtgggaggtgagaagctccgtttcccggctaggtggatggctaagtggttagagcaaccgctgcatcagcctgaggacaggagtgaggactctggcactgtaaatgcctggtaggcatggcagtttgccaataatttgagacttgggaaagtggaagcaggagatgcctgggacatactgatttttgagactagccaatttgtagagctttgggctcaactgagagataatgtatagtgtggcaagccattgaggaatactcaagacatcagtgttgtacaagtcacagtcatgcatgagcacagtcacactcatgaggttgtacccatgcatgcatgcaaagatgtgcacacatatacagacacacagctgagcccacatacatgcaaaaatacagacacacaatccatatacacataaaaacaaattgtatttcttctgtctagagtgcttttaatttcattgattgaaaatataaacatactgggacagagagatcggtcagtggttaagaacaggtactgctcttgaagaggatctacatttggttcacagtggccaagtcaggttgctcacaaacacccataaatcctcctccatgaaacctgacatctttggcttttgtaggcactcacacacatgtaggcacacactgaaagctaataaaaattaataaaaacatacacacacatacacacaaagagaaaactaataaaaataaaattttaagaggaatatgcatgcacacatgtctttaaagtatgtaattcatactatatacctgtcatgggtatgtgtatgtgtgcatggtaagtatacatgtgacacatagcatgtgattcttatatgacctctattgcaagttatatcttctggtctggaatccattcttcactgctatccatgggtgagaaatcactcttcataccttaccaagcacaggacacaaatactttcatgttcagcaccaatggtagctaactactatggggggggtgggggagatgtgactgttcctaggcatagtgggggaggggaagaagtgttattgtcatatgagagagagcgtagccagaggaagagaattgggagagtccagagagtaaacgtgaccctgactgggactatgtgaggagagaggggacaagggagaggggagagccaggattgtaaagagtagaggaaaagcctagataatcaaaatgtctgaattatatggggcatggcaaatgggggaagagcagcctagcctttgggctggagaagtttagggtagggggcaggctatgccatccataccctgtaacttctagttactgagggatgctgggaaaacttggcagccaagtctactttgatagttaagtcggcaccttagttattgatttgtcctgggtttgaaacttaacatcttctttcttatccccttgttggtgcattttaaataactgtgtgtggggggacaacctgtacaattaagtaattaattgactaattaattgcatttggattccctagaatgaatgacagacttctgggtacaatacacgtactggatggttactggtgaaatacatatctaccaagcatcccatgtgtttacctagccagcacagtgacttcccactcaatgtcatatactggagaatgggctccatgtacaaatttgtaattgactgagattgcaaggttgggtcagtggataaaggtgtgtgctgccaagtttgagcatctgagtttgagtgttggaactcattggaagggaaagaactgagtcttacaagttgttgtctgatttgttaatggatgtgtggtatacaaacatgtgtgttccagtcatgtgtctactgcatagaacaaagagtgaaacatcttttgtgtatacagtgggcttagccctaaacaaagagtatactgagagccttccatgactgccatggttatgactctcatgtgtacatgggagtataaaatggtgtgtatgttcgtgtggtatgtgtgtgtggtgtgttgtgtggtatatatactcatgggtggatagaagccggggggggggtgtcagaagccatgccccatcactctccgctttattccgttgagacagagtctctctgtgaacctgtggttatattnnnnnnnnnnnnnnnnnnnnnnnnnnnnnnnnnnnnnnnnnnnnnnnnnnnnnnnnnnnnnnnnnnnnnnnnnnnnnnnnnnnnnnnnnacccttacctgctgagccttcttcttggaccccaaatgtttgaattttgtcttagccaccaagttgtctcccattcagtcttactcaagccctcttgattcctcatggttgtttccaggaacctaaatgagtaagtagtcacaaattgtttgtttgtttgtttgtttgtttatccaaagctatcatgcctgccaagcaagtctagactcctcctcatattcttccttcagctgtcctgaatcacaggctcctttgtgtagttttgacagaaattttgttgcatttgacagaaatgctgttgcataggaatgccaacaagcagccctccgatcctagcgcatgcccctgcacgctgtatactcactcacactgccttctcttcaccttgcgcaaatccatgactgtgtaaggatatacagcatttggggccctcactctgaggcgccactcagaacttctcggccaggtgctcctgctgggctcttcaatcctagacttttatcaggactcccagcttctgtttatccaaagtgcttccacattgttctcaagtgtgtctggaaattctgcttacactgtctgtcaagatgtccttcaagggtggagttaatctttcttatcgagtgctctgtcaacatgaccttctacacaggaaggaatgaaaagcccctctcccttcgtcccttaccattctatcaagtgggaagcagacatgctttggtgtcaagagcttatggctattttatttcttatgtgactttccttgtgtgtgtttccttgttactaagatatttatagactcatggggaggggacattttcaattatgctttattttttaacactttctgggggacacaagtatgccaggctgtgcctatggaggtcagaggacactggggggagtcagtgttttccctccactgtgggcatccctggggttgaactcagatcttcagatttgtcagcacgaggctttaacctgcagagccatcttcccccccccccaccgccccccagagttagttaagtgtatgtctttttcctttcttgcaaaacaacaaaatggtctgctttgtgagattattcaataatgatccattactgaaataattacagatatgttgatgtggaccatggaaaactttctcagctagtatgtttttaaaaggaatgtgtattttacatccagtctctttctctgcccctgctttcaactgagggtgtgctagcttatttatgatatcaagccttttcccctaagctctacaggcccactgcggcctactaagcctgcttgccacacttgcttccatcagactgaagcaaggcccagccaggctccacccccacccgcagtctgcctcagctgtcactcaaactaattgcttgtattcagtgtaattgtatctggattggtggaatttgccagacacagaggagctgctgtggtctgacttgaaagccaacagccacctggcccaggtgtcctgggaagttgcttttgttctcttctctggcagccttggctttcgctcagctctgccacctttgctgggtgagcatcaaaccagcatttgactcttcctgttctttccaggcccgagccatctcttccgtcggaatcactagaattctcgtaggcaattattttgggccatctcttgctttgcgccagaatgtgctaatcgcatttcaagctgagattgtagagtttatcacaaaggacatctgagcatttggggttataacctaaccagaattagaggtagattttcatatgtctcagaagtagtggtcagaagcaaggtcataatagaatagaatccgttcacgtattgtgagagctagtgtctgcatatgtatgtgtacttatgggtaatgtttatataggtgcacttgtttgggcaggtgtatatgtatatgtgtgggtgaatatgtgtgtgtgtgtgtgtgtgtgtgtgtgtgtcctatgaggtcacaggtcaaaagcaggtatatttcctcagcggctgtccatcctgtttttgaaacaaggtcttttattagcctgaggctcacctgattgatctaaactcactgtccagggtgccccagggattctcctaacccccaccccccgtgctggggttaaaagaaaactgagtattagaatactcaaaacattggtagaatgtgtgttttttcattaattaattaaattactttacatctcaatcagagcttcccttccctcctatcctcccaggcccagaaatggtttaaaactgaaataatttttagccttttccaaatttctggctttggggaacaatggattacaagttttgattctagggggaaaaattggtttttaagggggaaaaagtcatacagtaaaatgtagctaaaattaaatggcaatagtaagaaagcatgtgtctgggacattatgaacttaaaaaaaagttacctggatatggtggccatgcctataatcccggcattcaggaatttgaaaagatcctgaattccagtgtaccatgcccggctgaatatgaagttactcaacttaatcagcatattttctaaggatgcatttctgcttcatttcctgtagccgtgagtggtattggtcctgagactactgtcataaagtccttcgtcctaggaggcatgtttgttgatatgcagtgattaaagtttctgacttaatttgtttactcctatttcataacggtccactgtgtcgtgaagtccacatgagagtagcatgcttccttgagttgttttttagatctctctccttttcactccgtgttgctaatttcttccccatgagattaccaaccctagcttgttctgcttctacatgagcaagagtatcaaggcaaggcccccatgtcatttatatccttccagttcagaacaactgatgctcctgaaagccccgtgtctccctgagtacaacggacaggctcagaggcttgggctatgtgctgcacgagagctcaacttgctgctgatgccactgcccaacccccagaggggaaggctttccatggagcaccacactggtccaggaagttctacttctgctaggcatttttctcaggctcctgcagtgcgcttctgagttcatcttgaggagaaacatctccagctctttattccctgtagggctgccagatgatgggacagtgaagaaggtagttggcgggtacacggatcaatctccttgtgtaccatgccttctcccttctatgactacacaggaagaagaaaagcatcgttggcttgtccaagtcctcatgccttggctgatgcctttcagttgtcatgggtctgagtcctactgtgtgctccttatgtatattttcataagtcagttatgttgggtacatcagaaagtgaatagacattagggcatcactaggcagaggcacatctccctcccttactgtgctaagtcattgtccttgctgttgcttattttgccaaatgaatttcctgctctccttgagcttaattttacttctgctgaggtaaaaatgagaatgaatattcacagggttgttgaaaagaggtgagatctgtgttcaagaccgctgtccaccacacctgaaatgtgtgctctctttttaccccgctccccatctcctcctctctgccctcccacctttcactatgcatgacgtagccctcacccccatgtccccgtgagcctccacttcctccagcatatttttccaaattgcaaagccacacagtcgctaagtagtcaacattatcacagtgagcaagccaatatctcaaaacgcaaaactatagatagaacccattgacagatcatcttatgatgagtttgaatccagcagaagctagtattggtcacaagtggtggtagcactatattcttcaagcagggttggcctttatttaaaaagataaaacctggaaaagaaaagcaaacttgcaaaatctgtagagagatggatggaacagaaaaactttatattaagtaaggcaactcaggcttggggagactgcatattccctctcacatgtagacttagtttccaattgttgtctgtatgtatgtatgtatgcatgcatgcatgcatatgggaggaagtgtaggtggaagtatggtcactggaaagggcccatccacaagatgtgagaattgagattgtaagggagggaggtaggtggggtaagaaaagacatgatttataactagaagggggacaaaaggtgaagaggggtacaatggggatggggtgagagagatgggggaatcagtaaaaacttagcatgtaagaaaaacctatggggatccctgctactttgtatactcattaaggagatgaatatagaaccatggctatccccagttgtgtgcctagagaagggggcagtagatacattccatctccttattttgtgtatgtatttataggcctgtaataatttttgtttggtggccagactgaatggaagcgaaatcaatgctttggtagataactcgttactggaggtagtcggagttctgtgatcagaaagtagctgctgtctcccagtatacgactgtgagatagatacaggagacaaaatagggttgcagagagattgcttctcctcaggcccgactactgggctccactgttcacagtggccctttgcctggcatatctccctgaaggaggtaggttagtttgctacttcctaagttgctctgtgctcacactatcatcatacctaagttagtctgatcacaagcaggaacacatgtgaccttggagcagggtccctgtcttgaattcctcttgggtgtgcttttactttaggctattttcagagattctacgagagtgctctttctccctgcaggaaagacagtgagaccctcaactgagcccaggcttatgtatggctttatttcaggtcagccctttgtgaacccggatggaacgcctgcgatatacaaccctcccggaagtcagcagacactgcgtggcactgttggtgggcagccccagcaacctccacagcagcaaccttcgcctcagcctcagcagcaggtccaggcatcacagccccagatggcagggccactggtcactcaggtgaggagctggcctaaagatgagggccacaatagggttcaggtcagcaatctatctaggagaaaagatacggcgtgtcacttcccatcacgcttataggtaaaatcttccagagtataatcgtcactggacaaaagagtatctgcttatacccaatgcaagtgtctactgggtgagagcagatactagggaaaacggatgcacagttgcttgggtctaagtattgtttgtagcaaagcaaattataatcccttctaggactttgagttaattcaccccctcccaccacagatcaaacactcatgtctacataatcagcactgccctttccttcagtgggaagagcagagatcgccaagtcccagctgacctggatgttcatctctgggctcctgtgaaaggtgcagagatgccctcctttcccagggaggcacaatcaaccctgatgtgttctaagcaggctccctgggggagtcttcttttttatgtgctttcacttcttagttcttgagcaacacatgtctgtaagttcagagcacccaaccaactcaagtgcccgacacttcaaggcaggctttccggagccccctcaagaccaagccatctggctctgcatacacagctttcctctctacactgaatgatcttggggagcctcttaatgacagcaatgcccttcccatgggatgggatttcaggcccccacactcttacctgatcagtgttttcttccctccagtctgtccagagcctgcagccatcttcccagtctgtgcaatatccagcggtctcttttcctccccagcatctcctgcctatgtcgccaacgcagcacttccccttggtatagtatcataagcataacacacacacacacacacacacacacacacacacacacacacgcacatgtacacgcacacatgcaagcacatgtacttacacacatacactcacacttgtacatgcacacccgtgcacaggcaagcagatgtgctcacatatacacacactcacacatgcacacatatgcatgcatacacacaacacatccatgtgtgcatccatccacacatgcacacacataagcacacagagcatgctcacaggttctacagtttttctgttcagctatagacggtaccaaatgcacggcctgggctgactgtgacgtcatcgtatacatgtaaatgtgtcatgcttgactgatacgatccatcccttcaagcagcttgctttcttttgcctgtcttccctaagttaaacgcttctgcattctgaaatcctttttaaagtttactgactgaatggcgggggaaatgtcaataaaatacttcctaagtaggagggactgagttcagattctcaggactcatataaagagccagccatgtagtgaagatctgtagactcagtgctctggagacagaagtaggagagccatgtgggcttccttgccagccagtctagccaaacttatgagctccaggttcagtgagagactgtttcaaatcataaattggagagatattggaggaagacacccagtattggcctctgattcctcatgcataggcacatatgtgcatctgtgcacacatacatgaacacatacacacacacactttactaggcaagcacaacctattatccttagactttgatgtcatgagcaaacaggttacatgatctcgatgtaagatcactagggttatctaaaactcaagagtcaggaatgcagaccatcactaccctaagatcccgacctcatgtctcctaagaatccagcctcctgcttcctttacctgtttccctaactacagtgagtccttgtaaaaacagcacacaatccataagtatcaggttacgcccagtgaatcgatgttttctgtaagatggacatgctccagaagaaggctcatcttctctggagtaggcagatccaggctggccatggaaagacctgctggcaaccacaccttcctttgctgcccaacccctcaatgaaaagagaataatttccttctgttgaaagaagaagattttggaccaaattgtttcccacctctgggcttttcagctgagcaaggcttaatttcttgcatgacttttcttgatatgtctggctgaagaactcttttattgatttgtttgtttgtttgtttattcagtgtttgcttcgcttcctcctcctccctcctctcctttctggtgtgagtgtgttatctacctcactttgccttacgcgtgaccgagttcatttattcccctgtctcgcagagagaagaactggctgcccagttcagccagctgagcatgagccggcagtcctcgggagacactcctgaacctccctctggtacagtctacccagcctctctcctgccacaaacggctcagccacagagttatgtcatcacttctgcaggccagcagctctctacagggggcttctcggactctggcccgcccatctcccagcaggtcctgcaggccccgccctctccccagggatttgtacagcagcctccacctgcacaggtaggtgtgatctttccctcccttcttcaccacagatggcttgtggccctttgatttctgccattgtcttgccctcttgttcacactcagtccccattaccagtatactttgtcctcttcctgagatcctcatggtcagaaagtcaaatgaacctcaaaggtgagaaacctggagacatctgccttgtagctggcataagcccacggaaatgactgactctgggttagcgagatggctcagttggaatagggctttatgcacaagggtgaggagctgagttcaatccccagaacccacgttaaaaagataggtgtggtgggctgcgcttgtaatctcagcactgaactggcagaaacaggtgcatccctggggtctactggcaagcagctgcagccaaatcagccagttccaagtcagttagagatcctgtctcagaataaacaaacaaacaaacaaaccaaaataagctggatggttcctgagaaaatgacacttgaagttgacttctggcctctacatgtacacacacacacacacacacacacacacacacactcactcacacacacacacacacacactcactcacacacatacacacacacacacacacactcacacacacacacactcacactctcacacacacacattcactcacacacacacacacacacacactcatactcacacacactcacacacacacacacacacacacacacacacacacacacacaccatatgggtgatgctgttcacatggcaaaagccaggaaggggatgtcctaaacctagaaaccttaaacccctcccttgctgctcaagaaatttgttttccttgcttatccgttcacagccgccttctggagctgatctccgaaaaggcgtgtctctatgaatacaaagaacagagcaaagccaatatccactgtcctttcctctcccccaggagagccagagcccacagcccatctcacaggtagccattaatcatatttaattgactggagcatgtaagacaccacaggtcactgatttttactgtcttctctaagactgattgtgtgttcctgtccagcaccaaacatctctggggctctcctgggtatcccttgcagaatattggaagtgattactgtcaagatggaaaatgcgcaccagcattttctgctccgctttcaaggcgtacacaatcccggccagcttccgtcctaattatgaagcatagcctgggaggtgctgtttaaagtgcatgtcaccgtggtggcattagttccactgccttcacatcctgaataaattattttctcttcaagacacacaaaactctctgccaggaaacgatttttttccctcagttgttcattttgaatgattaattagtggaggaccccccccactcaccatctcagtaatatttcctccctggtgggatttaaagtcgtgtttaagatagtattaagtaactattccattcccacattaattattttactataaattcaatacttcaaacttaattattggaaacaaacagatccattgatccaggtttatgtaggtcacaactcgtagtgacttctgatgtaatcagaactttaaagtttagctagccaaccatgcaacactggagagagttccactcaaccagtctgggggtgttggtggaaatatgtctgtctcttcaaaggaccacctttgaatgttttctatggcttgtgtgtgctttcctaatgccactagaaggagaccactatccacctgagtgaggctaagaacaacctgagggaggggcattgagtttcccaaatatgtccatgggctcagctcactttccttcccctagaggactggaggaatgggatgggccaagtgcccattagtgtctgagtgtctgatgtcaccattcctaaggactaagtaatggcacaccacggagaagggccaggtaaagttgcccaaatctttgctaagcacagaaagaaatacaatttaaggggaagaacaagattaaacaaacagaaacgagtagcttctaaaatctacatatatcaagtttgacatttttttccaaattatgaatgctcattaggaacttttcaagtattggccctccattctttacctttgaagtgtttcttgattaatattctatcctagaagactacagaaaagatagcacgggctggtgaggccaatttgatcattaggcccatatgctggaaggaaagaactgactctcacaagttgtcttcttaccactatacccattccatggcatgcagagtcccacatctatctccacattcccacaaaacacacttatgtatacactgaaataataagtagttttaaggaatgggcattgtaaacacagaagtggatgctcacagtcagctaatggatggatcacagggctcccaatggaggagatagagaaagtacccaaggagctaaagggatctgcaaccctataggtggatcaacattatgaactaaccagtaccccggagctcttgactctagctgcatatatatcaaaagatggcctagtcggccatcactggaaagagaggcccattggacatgcaaactttatatgccccagtacaggggaacgccagggccaaaaagggggagtgggcgggtaggggagtgggggtgggtgggtatgggggacttttggtatagcattggaaatgtaaatgagctaaatacctaataaaaaatggaaaaaaggggaatgggcattgtatttataagcttatatggaaataacacataatctttttcctaaggtacaagccagaataacagatgcgcacatataatgataatagatagttcggaggtacttgtacttgttcttaatattgtagggcatctatgtaatatgtaatatgtaatagcgacttttaactgtatcaagaaaaatttccagaatagatctaaatcgatttgctcatgaattctttatgtttttagtttttttgaattgagattatcaaaaggagagaacagactaaggagatgatacagctcatagcatgcttggtaaggcagcatgaagatctgggctgggactgctagcacctgtaaaagctgggtgtggctatgcacatctgtaacaccagaactggggaaggtccagggtagaatcaagcaggtccctagactttattgactgcccagtttaaacaagctgttgacctgaaagctgttgacctgaacgtttagtgagaaaccctatgccaaaagtaagatggagggaccagagaaatgactcacgggttacagatgacctgggtttcaactaccagcacctacacagtggttcaccactattcataatcccaactccaagggatgtgatttccacagacagcagacacgagcagagttagggtgtacatacacacaagcaggcaacacattcatacatgaagattaagacaaataatcctaaaacgtaaagtggagctgctgacgaagacacccaacatcacactttaaatgcacacacacacacatacacacacacacacaatgagagagacagagacagagagacaggttaaatgaccacaaataatgagtgcaattagtaaatgactgattgctaagcaatgaggcagaatagttctaggctctcccagccccttcccctcggtcatctaccatactagaaagtgagaatacagttcatgttgattccatggcattgcaaaaccacagccatacaatgttttctttgcttccaccttcttcctgaggtatgggaacatattatacactctagtagcaagagggaacactagtatcttatgatataatcaaatcaaaagataaaataggcataaaaatcagagctataagataattagttcacaatcttcttctatacacacaacttgtatactttggagtatatagtggatggccacctattctccctttaaagatgagaagagaaaagccagaggcctgaagacagaaggagttagctgaaatgagtaagaaactagcatcacatagcattaataggtaggcaaagatgtcttctatatcaggaagcatctgatctcaatgggaagggttagggtgttttcactggctgtcagtcattaaacagtagacagaaggctggcaggcctgaggggtgtagacctgtaaccccagcatctgaggaaaatgaggtaggaaaattgtgaattcaagaccttcctgagctacagaatgagtcaaagtcttggcaactatgcataagaccgtcttaaacttcaaaataaaaggatctccaagaatggctggggagattggtcagtcagtaaaatgcttaccatgcaagcatgaatacctacctgcattcgatcccctacatccacattaaaaagccattcagagtggctcattttgtaatctcagagccagccgggcaagtggagagaagtagagtccctgggttcctcttgccagctgacctcactgatcagtaagtttcacgttaatgggaatcttgtttcaagcaaacaacatgaatagcacctgaggaatgacacctaaggttgacctctggcctccacacccatgaacatgtacacacacacatacatacacacacatacatacacatacacacacacacacacacacacacacacacacacacacacacagagagagagagagagagagagagagagagagagagagagagagagagagagagagagagagacgatgcctagggatacagcttggtgactaataaggggcttacccagcaggcacaaaagcctaaattcagtccccactactaaaaataagtttgcagaagatacctacacaatatcttaacatagatccatttatattacatatgctgcaaattttgatacaggctatgtataaatcactctttgaatctttggcaagacatcaagtggccttttgctgttcatgacacagtcactaaatgggcccgactcctcccaagaagttcatttcagttccatatggtactgactggagcacctgacccagactgtgctcaacatctgaagattgaggggccagtcagccagtcagcggggaggggagtctctgtcctcctaacacagcaggatagataggtgtttccctggagactaaatcctctgcccctgcagtggggttgcaaatctccttaaagttccggtatgggaatggcagacatcacatcacttttgcctctttgcattgatcaaagcaggttcctcggctttaggcaggagatagctcccatcaggggagaacgagcctgcacattgaaacaggtgtgagaaaggatgctcatggcccaccttcaacatctgccacagttaatgacactgtatcgcaacagtgggttttatgtgaaaaaatatgtttcttgtgaacagctctcatctctgtttctctctcctcttgtcccacagatgtccgtctattactacccatctggtcagtaccctacctcaacctcacagcagtaccgacccctcgcctcagtccagtacagtgctcagcggagtcagcaaataccacagaccacacagcaagcaggtacgggaaatgtttcctttcagtcctccggcttggttatttttgatggtgaatttcatagctgtacttactggatgaatacccaaagagaaaatttaagtcacatgtttcccctacccggggaaactagcaaagcaattgattcactctgtgggaaactaaaaggcgcgaggagatgagagcctatgagcctgcgcatgctcagttgttccccaaagctatttttacatcctctgagtttattttaaagcagagaaacaagcgcatccctatcttccaagcccaagtgctttgttgtttccttagtccttaaggggccaaattaggctgtgttgatactgtcctaaaatccagcgccggctttaaaagaaggctcctgactatgcagcgtgcaatattggaactctgactccatgttttactgccacgaaggccacatgcctgacacccagagccccggcagccactgtgcagtgggaaggggggccgatgcactgtaagagagtgagtagcaggtctcacagtgaaccggtctctttccctactgtgtcaaactcctaaggaatgccgcttccagagagcagcaggcgcccagcagggctaagggaaacgccgctaggcagaattccctgtcaatccggccgaccaaactgcagggagaaagtgctaattgtcatgctgaagtctctgcctctgtaagtaggtcacactaaagagctcctgctgcggctctccgagaacgcctgctctgaggtctgaagtctgcgatggatacaaccgtacaggaatgcgtaatatgtgcagatacacgtgggtgacatggataagatatgtgccatttttacaagctagaacaaacaaagaagcaaacaaacaaatttacagtccttgccaaggatttagctacaggcacaaacaccgcaagaactccaatgatgctgatgctgatgctgatgctgatgctgatgctgacgctgacgctgacactgatgctaaagctttgccagatccaaactggagacagaattcagttcttctgcacgtggccatgtgttcttaatttcattcaccactggcccatttaaagccgtttgagagaaattagaggaacctatgagagccagtttttaatcttgtttaaatgctgtatttctctgggacctttgagtgacccttgtacttttataaaagtaaggacaaaagtgtgtgaagtcatttttaagggaaagccttcgaccttgcattgtgcaattgccaggaaatctgcagcttgttggtagggactgtgcggttccttccattcaatcctacaggatagtgcacttgcatgtgaatggtcccgtctttgtctgcctttgtatacttaaagattattctttagcactgtgagaaagctgagctggtggccctaatttgatcatcagaacccaggtctaacataaaggtgtctgtgtgatgacttgggtttgtaatcccagccctggagagacagagacgaactcactgagcccgaggctcactggccggcccgcctagcctactgaacaaacatcaagccagtgagagagcctgtctcaaaagccaagatgtgcagtgcctaaggaatgaaacagctgtcctccagactctacacatgcgtgtctacctacacatacaccacccttgcactagtgtgcaaacgcacacccaaagttaccatttaatctcacgtaccacagagaaggttgcgtttgagtcaggaatgcattaggaagaaacatgatgcaggtcattaattctactgatctcacatgtatctagtgtagtgtctgggtgtgactttcagaattctaaagagatattccacgattgggtattatagtagaaagggggtgtggctacaacaatgtaggaacctgataagtgcagagtctgtgtccaggtcccagagccccagaattaggattagagcaatcactggtaacaccttggccatgcctcctctcctctgtctttccttatgactgatgacatatgagaaagtagctgcgatgttttcattcttttatgaggtgtagtgggaatattgagagacacagaaatccctcctgcatccctggaacatacatgtagataatctcagccacataacttggcaacctggtgtcatgtaggaccatggatatgcaatcccctaggagagttggtaaccgatgttttattattattattattattattacaaagagtaaatcctatggaaggcttgtattcagagtggggacaagggcaggttccacgtgtccaagccatgggtgacagtcattgtggtctgagagtaagagacaggaaaagggaaatggttcaagaatggcgtggtccccagacgtgccaccaacagcacacagatacagaatgagatctttgcccttccaggtttgatgattgcacctgacacctggccgacagtcccagcagagcttgccctacagaaagtgagtttactgtggattagtgaaggcagatggtagctcaaagtcacaaagaatcctgtgctgataaaatctaactgtgaactgtgatgacgcgagtatgctctacattctggaggaaggatgacctacggcctagtgaaaaccagcagagtttaaatatgccacagtggggttatttatgggaatgttccagtagttggacattgtccctttagatggttgttacagttgtgtgttctggccgggctgtgcaatgccactcccacccacaccccctactccatcctcatcatctttacggataaactctggtctagctgactcaaagccactctacagatatgctctgtctagtcttcctgctccaatctgggctatcgcatactagagcatttttgtccattaaagtcagtgagatttatccccactctgttctgaaaactccctgccacttgtatttaattgtaataaaaagcatctatctcttccacgttcttggcagagttgatcccctgtcaggttacaatgccttgcctaggccttaaaactccatgtaaggtcttgtttttatcatttttcccattcacgtgtttgtgtttgtgtgtgtgtaaatgcatatgtttatgaatacacatctgcatgcgtgtgggcaaaagagtgtgcaggtaaatgcggcaagcagtgactcaaggttaatgttaggaatcctctgtattcacagatagggctagcctgagtggccagtgttctctggactctatttttcaatgctggaattacagacaggcccccttgcccacctggcatttactggggagctggggatcagaacactggtcctaatgcttgcccagcaggtgtttcccccactgttatcttcctagcacagacagtgggtttttataaagaaaaccagagtccttgcagctggtgaatgagcaactgagctcgtggatattagtcacaccagggacaagaatcttcctcttggtgacttccttctgtttgctccattgataggcaatactaaaattaaaaatctccgcctgacgataatgatacacgaagaccagggatagtaagcagttttggagaagccaaaggggatatttccaaaatgatatttggatctcacagttatttatattggaaattataatcctttattatagaatatctcctatgggaaatgttctgtgcacatttgtaaatgagcacttgagaaaaatctgtgtttgccatttgagcaacactggccttataaaagagactgagaagtgtaccatccccttctggttttgttgttgttgttgttgtttatttgtttgcttggggggttattttttgattatttgttttgaggagactgtgtgagtttagagttttattttcttcaaatgttgacagatttttgcttagaaatgctttttcctatagggtcaaaataatgtctttagcttttcctgataattttataaaaatttccagagcacttaaattatggattgtatttaaaaaaaaaaagtgctcctgagtgtatgtatgtgtgctgtgtgcataagaaaaggtcataagagaatgttggaacccctgaagctggagtggttgagtgtcctgatgtgggtactacaatctataccctggttctctgtaagatcaataagtgctcttaaccactagtccatctctgatctatttgcggttagatggctgctccagtggtcttttacacaccaagtttgagtttgggaagatggcgattctcaaggaattggcccatttcttgaaagctgtgaaatttaggaacataaagttgacattgctgtttggatttctttatagttaataataactattattacagtttgcagaggtaggggttgaatcccaggtcatgactgctgagcaagctctgtagcagtgagccaaacccctgccccctgccttctttcctctcccacagttctatgcctggctttgcctctgcctaactcctctctttacttcaggatactctttctatatttaccaaatttacccaatctgtcattatttcatcaatttttctctattcatttaccatttccatttctgtgctccctgtctctttgctctgatgtcgtctcctgtgttcttgagatagaaggctcagttgattgggcacatcttgctctttctttaccataaatacaaagtcctctcttccctctcagcgaagcgccaccactgtgcccatatcctcacacgctgtgtttccatttccatggtttggattggttttgtctttcttcatgtggttgggatcaaacccaggaccttgtggatgcttctctagcagcaagctacacttctgagccttgtaagcatctttaaagttcttttaacattgcctctttgacccacacattatttagtgttgtgctgctcgatgcacaagggtttgaagagttccttcttgtcttctgttactggttgaaggtagagattcagtgtgattctggttctgcagaaatcgttgaggtggttttaacatagccagccatgttctaacttcaggaatgaacttttggggaaacgtttgggatggtctatgtttaggtaccatactgtacagatgacatctacattttgttgaggtctcccacctgttgcttggcattttatttgctagttctgaccatctcgaaaggtggaaattcacatgggtcataaaacctcctaaaggcctggcatatatgtccaggcaaggggtaccccatatcactggcccctggcatctcctaagcacagcagtgaagccttcaaggtacactgagcttgttgtcaactggttttttttccaagccaatgtgcatcacttccttcaaagagaatgctagaacattccacagtaagagtctggaagggaaagactctgatcagtgaggattgggtgagctgttatctctctctttctctctctttctctctctccctctctcttttctcttctcttctcttctcttctcttctcttctcttctcttctcttctttcctctcccctcccccttccccttacactaccctcccctccactccactcctctcctctcctnnnnnnnnnnnnnnnnnnnnnnnnnnnnnnnnnnnnnnnnnnnnnnnnnnnnnnnnnnnnnnnnnnnnnnnnnnnnnnnnnnnnnnnnnnnnnnnnnnnnnnnnnnnnnnnnnnnnnnnnnnnnnnnnnnnnnnnnnnnnnnnnnnnnnnnnnnnnnnnnnnnnnnnnnnnnnnnnnnnnnnnnnnnnnnnnnnnnnnnnnnnnnnnnnnnnnnnnnnnnnnnnnnnnnnnnnnnnnnnnnnnnnnnnnnnnnnnnnnnnnnnnnnnnnnnnnnnnnnnnnnnnnnnnnnnnnnnnnnnnnnnnnnnnnnnnnnnnnnnnnnnnnnnnnnnnnnnnnnnnnnnnnnnnnnnnnnnnnnnnnnnnnnnnnnnnnnnnnnnnnnnnnnnnnnnnnnnnnnnnnnnactctgccgcccttggctgtaaagagccagtagctcttttactgtgtgtgagcccgtgggtgctgccattatcagagccacttctgctgtggtccaatgtgttcatcagcagaagcagctctcaatcattagctctcacacccttccactctgcccttccatggtgttccctgacctgggatggaaagtcttgatagatgtgatgcatctacagctgagcactcactgtgacttagactcaagacttggagctgttctgagttgctacagtatctactgcccactgcaaaagaagcctcctgacagtagttgagaggaatacaaccccacgggcacaaacacaaatatccagaagacagacagagagaacagacagcaagacaacaagtctctagtctctctcaggcttgcacacacactcttggctaacagcaggattatacttcaccattagatacgatagtaaagatgacaccctcagacagcacacagatctgcccacctggcagagcaggaaagcctgggttttcgcatgtcgttaaatctgtagaacaaggttgttgtagagcagagagcaacccccccccctcagcccccagaggttcctgagttatattataacggctgcacatgatttcccttggattttgacagcaatagaaatgatttttcaggtttacttttattattttttaattatgtgtctgtgtgtgagtgcagcagctgcctgtggaagccagaggaggatgctcatgtgagctgcatgatgtgagtggctgctgggactgaacccatgccacgcataaaatagcacatgtttttttttaaccctgagctttctctcctgggagataggtctccccttgtttggttttgatttttatacagggcctcacagatctccaccccatccattagctcctgtgtctcttcacacccgaccttccatgatgttccctgagccttgagtgagaagtgctgatggacattatttatagcctaggctgatcccaaagtcactctgcaaccaaggacaatatgagtttctgatctttttgtccgcatctcttaaatattgagattacaggtgtgagtcatcacccacattcttgcctctgttttttaaaggccatttgccctgtgcatcctcctcagagccaaacacctgctgactgacttcttttggggcaaaaactgtactgtagagagagagatttgtctatgaaaaaaatgtttcacatttcaaattatagttcagatggaatctccccactcaggctcatgttcagataaacaaccataactagtatctgtaagaaaaaaagaaaaacaaagattgactggagaaaggaaaatggcttggaggttaagaacagttagtgctcttggagaggaaacgggttccattatcagtacccatatggggcaatataaccaatggcaactctggtgccgggatatctgctgccctctgctgacctttctgggaacttcatgcacgtggtacacatatagacatacaggcaaccattcatatacataaaacaaaaataaatatttttgtaaggacatcaacatagggggatccttgttggaaagaaaaaaattaggttggatgggtgcgggggatagaagattaaaaactcggaaaatatatgaaattgtcaaagaatttaaagagagggtggaaactgtattgtactgcaaaagccgagccgactcgtgagaattccttatgtgtattgaatgcaattctgctccttttgtaaaagtctccgtgaaaaaaaaaaaggagagttgagtaaatgatgccccaatggtattgaaatattcaggtggaaatcccttgcaaagacagtagtcaaggccttcgttaacccccaccccgggatgaatctcacagggtaagtccagcctggccttaaaccctcaatctttctacctcagccttctcaaatctgagataaacctccctctggctttctcgtccacaccaccccacagccatcaggacacaggacaggtatgcacagaagcagaacatgaacatatgatgaggctttgtgagtaaactgagcctagaccagccgtcggcccagtgcagtcagagatggtgggaagtcagaggtgacaggaaggttcctgtcagagatggtgggaacttcacaagactccacagcattcagattgagttacaaaggcagctttcaaaacccatgcaggcctaccatgtctgacaaagtctctgaatgtgtgacgtcagaatcaccaaatgtagacaagttatgagaggagcaaacacctgagaacgggagcacggtcctcaaggctctggaggtgtgtcatacctgcattcagggtttatgtcaatgagagactcatgaggaaatttgagagaagagagaaccaggccaaggaatgtagactctgtttatcatgtgatggtcataatatgacataaatataataatattatgataaaatgatagtggaatagcacagaaaactgcaggtggctttctgaagtttgggaacatctcaaaggccacacttccatccctcagctgaggaatctttggtgtgcaatgagttcttcagggaagaattgcagtgtaggagtgagtccgtctgttgaaaattctagcttaaagatgagcaggtttagctgcactcaagtgtatctgtgttcattttggtgtgtacagggagtgtgtataatgcaacagagaggagctggagagtgagagtgagagattggttgattggttaattgatgactgattgattggagggatggaggaactgtgctctcattagcctttcttcttggcatctcatcttctcaccttggaagatacaatgcctcagttaaaatttcagcatatttgaaagctaaatgcaaatctctcagccattcaattcaaatataaacaagacctcagctttaactatacattgttgaacggaaaagaatggcaactggacaaatcagctcccttcagcaggcaaacataccatacatattgttaaaagttcagacctttgtcagggtgaagtgtgtcaggagccaggtgtgtttggtgacttgggaaaccttaaaacaggaagcgctgttgttgagtcttgaggcgacaggacgtgacccagtcttgacaacccatcttgccatggtgatggcccctcatttctcctccaacacctctgtgttctgtggaagagagaatgatgacacctctgtttcatgtgcacgtttgagagtgcaccaaaatcagagtccccttcccagcaggcagtcgccttgtctgcatgcaagctctatacgtaaggagggagttagctcttggtctcttctctcaggtgttctattctattgtaatggcgtgctgttcgaattaacctctctgagtaagaatgttactacctccctaatgttctgaagtacacttgtgactaggcaaatgacaccatcacaaaatccatacccttatttaagggctcacatcattggcacttctgataaaacaaacaaacaaacaaacaaacaaaaatccaattctctatttcatgtgcatgtttgagagtctaacttatctatcatttggtgccaatgtctctaggacacctttaaataagtctccttcctcattctgtttacttatggtatttcactactgaacgttcctctcttggggtcggaaggaaatggagggagaggaggggaagcggcagagtggcagaaggggtgggatttgatgtgataaataagtgtattcacgtatggagttagggaggttgctaggttgaaaaattcttaccctgcaagcgtaatgacttgggttcaacttccaggacctgcactgaaacacctggcacaggagagtctctgggactcacgttcagccagtcttgacaaaatggtgaggtccagtctcagtgagaaaccctgcatcaaaggataaggtggaaaaaaatgaaaaggacaccccaagtcaagctttggcctccttgtgtgcgcacacacccgcacatgcacacactggaaaaagaccaagaatgtgatatattgacttacagccattgggattttgttttcctattttaatttttctttcctgggatttgattgttctaaagaggatttaattaattatcttacctataatttccgcacatgttcattctcaaaactcctcaatttttaatacataaataatatatgtagtttgagaaaacagcatgttcatgatcactcagagaagcaacagaaaggctgtcccacctgacagcccggggagagtgcagcacaatttttgtacctgattcatgctatcagaagcagaaagataaaggatgaaagagtaatgggagtgtttaatggtctgtctgatttctgttaacatccgtgggagtcacacggataaatccttgtggaacatactgttcagaaaataatagcttggaaaaggtttctatggaaatgtccccgtgtttctttcactaattgccctaattattacagtcttacatacacaggaatgtggctgagaagtatcacattgggattctgagaaaggttaacaggtctagggactgatgacagctatcactgtttttaggcatgaagaatccttcacgttcctacacgtaaatgtctatgttccctgtgccccattgggatttacaatgaaaaggctttgttggacatggaagtagctgtgtatttaacccactgcttttgtggtatctctcagttgctgcattttcttgtgttaggccatgggagtgcatgggtgtggtgatggttttcctggtgtgtgtgtgtgtgtgtgtgtgtgtgtgtgtgtgtgttatctctgtatgtgtgtgaatgtatatgcaggacaacaaaccacacagtttctgctttctaattacacaatagaaaatggaaagcaggagtttcttgaaacaaaggaaggaggagccgggagacaagaaaagaaaggcagaaaggaaaaaaaaataaatgtattcttctgagtgagttttgaaagctttgggaagatgtaactgttaaagaatatggtttattaacacctttaatgaaataatttaggagaaaataagctattctgagacttgtccagtcttgactggctgtttctttgcccacatctattgctttcttgattattacattgccaatgtccttgtctcagttattgccttcattaggcacattcagttccatgggtcttcaggacacctttctaaaattcctcatcctcattgcttcctcctcacacctacatctgcatcctcctcacacccacatctgcatgctcatcacacccacatctggatcctcctcacacccacatctgcaccctcctcacacccacatctggatcctcctcacacccacatctgcatgctcctcacacccacatctgcatgctcctcacacccacatctgcatcctcctcacacccacgactgcattctcagtttcatctccagctttaaggctgagccagctcacgagggtttctctttctcctttatattagacaagattttcactggaacttccttatgctctaggttatgttttcgtctcctttctatctgttcattatacacatacatacatacatacatacatacatacatacatacaaacatacatgtatctatgtatatgcatggatgtatctatctatgtaaatatctatcatctatgtaatctcttatctagctctatatatttttctattatctatttttctatctattacctatttctactatctgtctatcatctatttgtccatctattatctgtatctattgtctctctatctatccatccacccatccatctattatctttctattgactgacatgtgcctttagatctacatattcttcctccccttgagagctttattctgccacgccagttctgagtacctggctatccttagactcagcctgaagggtggcccttgtctttgtaacttcacttaaagatccactgagatgaaatataaggagtgagtttttatctttcttcccacactagcagatactggagtactcaaaaccagactgttagattcaggggaggggtatttgacatctccactgaattcacttttgcttgaaaatattggttgccttcctattttgaatatgaaatagtatgcaatcattacatggaaaggaccgctttgaattaagttgtcctgaaggatgttcttcaaaatcccttttgcattcccactgtcttcagacgtggcagtttagtgcacacttcagggacacaaatgtcattttaacaaaacccacgagaaaggacctacttcacccatcacatcccagctgctcccttctccatgatcagaatggcatgcaagagtactagcccttccaggtcagaggcagcagagctgctctttccacagcagctgagacaggcatcagtcattgccatccatagagacgacagaattccatgtatcactgagttacgatgattctgagagagacatcttgtctcatacaccctctttagctggagaatcccagactacacagttaccagaagcctaattggatcagactacaattctgacacccttacctactgctcaatgggagatattggtaatatgtagtttccaaacttagacaatccttgaagcctcaacaggcttcctcagtggctttatccaggggcaccaggaatgaatttgatgcccaaagactcctcccatctctccgtaatgtcctgatgacatattgtctctggctcccaatatattttccttaaacatcttagagaccaattaaaactggatttttaaagttcttcaaaacattcctacctctttactttgttgtcattgttgttgttgttgttgttattttccccctccccctcctccccctccttnnnnnnnnnnnnnnnnnnnnnnnnnnnctccttctcccgttctagaaccttggcacattttatgagccatgggtttctgcccattataaaaacctcagctttgctgtcccaagcctagacagagatgacccagagagcacactccaaggctcattagaagtatgagttataatctatgtcataactgttctaggaattaaaaataaaatacagaaggacaggggcagaatagagccccaaacaccttgcagagtacacagtacttcagataaccccatgctttgaagcacggcaaggatacccacgctaggtcaacctggttccatgtggttttgccttatttttcttatctaaagcaatcaaatcctaaaggaatgccattaaactggtctccataggcctgagcagcagtgtgagttgacaagacttagaggtctgagggtttgagttttctccagggaagtgagatggagaccccatctgagatgagctacttctccctgctcaaaaaggctcggcgctgtctgtcctgagcctgggtgtgtggagaggagtcaagaagaaggatgatgcaaagacgaaaagaaaaccacaagaacccccatctttctcccttagaactggataagaactgggatagaggaaaggtgaccctgaggatactatctatagccttttgatggacagaacattctatcaattgtgaagaggaaagggcacttttagtaaaagaccgaaacctttaacacagaagagggtttttgttgttgtctcttctttctctgcctttgagcctgtgtgtgtgtgtgtatgtttgtgtgtgtgtgtgtgtgtgtgtgtgtatgtgtgtgtgtgtgctatagacagggaactgcttgtaataagagatcctgccacttactaataatgccagttcttattgatacagcatatctttattcaacatttaatattttatattcactgactcttccaacatctctaactcaactatttaataagtaaataaacctgaatttaacgattccaccaaggtttgtataaaacaaaaacaaaaaacaaacaaaaaaagtaatccacaaataagcttctagactagtgagaataagtttactcggttgcaagcacaagaaccaaatatgaatgtcagcagtatggttttacactattggctaataagagggttttgaattccacttataatgttggcacacttttatcaacagtattaacgatcgttcttctgacttgggatccaggagggcctgcatcagctgaggaccactcaagagatcttccccagactccaccatgattgtgttttagggagctaaagcaccatgtggtgagatgcctctccaggtgccctgttttcctgtaccacagcatacactgtgggggtacgtgagcttgcaaatcttttgtttgtgattcttcagcttccagttagagcaagtatttcataacacgctgtcaggagttgttatatttggcttggcagtctcccctcagacatgaaggactctgtggaagtttcagggtaattttcaacctttgtcaaaaactattgtcttttagatttttctcattgttaagatggaacaatatggagtgctcacaccacatttaatctctatgcatagacaattggaaggcagttttctgggctgcagaaatgtatgcacacacacacatacatacatacacacacacacacacacacacacacacacacacacacgcatgcatgtacacatatactgaaacctcacaattccctgctgttcaggttcaaggacatttacttggtttagccactgactaaaagactcctgcaactcactgattctatttttccccctaaatcaaacagttcagttatacaattggcattctctcctcgacgcctttggctttcatagtgtttaggtagggagatagaatctgggctaaatgaagttgtgcatgtgcaagtctaaatgtgatggtccagatgaattgcttctaaatgatgggtaaaatctggttttacatttattttcaggccctgaaatttgtataaaggattgggggggggtgttttgttttttgtttttgtttttgtttttgttttttgactctgatgggatacaatggcatgtttagtgactgctgtaaagtcacctattaatttgtcaatattcacaacacacttattaagaatgcttctgaaggatctctacaagtctttctccctccattaaaaatgagaagatgtagctccaagtatgtagccctgttgtaagaatgcttgcctcatatgcatgagatcttgaattcaaatccatcatctgggtggatacacaactgtagcccaggcactcaagagctagaggcagggcagtcagaagtttgaggtcatccttggctatatagagtgtgaggtcagctggggatagagaagacctggtttaaaataatattaataataataataacaacaataaataataatgatataaaatgtagcaagacaaacatagaaactgaacattctaagaaggtgagccgactgagttctaattctggaaatattacacagcaagttcgtagatgacctgagcgacctggagcattcggcttcctggaagcaccgggaaatcaataaccccacaccacttgagatctaaagttcaacttctttgcagcatatcgatccttcggtctctgattgctgccttcctcagagcaatgatgaatatgcacacacagtggctggcttctctcgtaccccactgctgagcctgtcagtcacagaagggagagccacaagcccactccttctcctcccttctgcggagttgctacctgctcagctgacaccacaggaatccaagcaggctgaggccaatgccccctctgcaggattagctccccagtacaaatagagatgaaaaaacatgttaatgtcatttattttctaatatttttctctcaccatgcccacctttcttctcatgtggattaatccagtgaaacttattttcctaccttcagatgctcagtctgtgatggctctgatgcggtatcttccaaagtatcttaacttgctggtgtgggtctcattcactgtaaactgaagaaagatagttggggcagaaaaatcaatgttgttttggccacgtgtcccttccagtatagccaacagacacttgtactttgaattaaaatgtcaataatttaaattacccaaataggaagagtgagcctgtgtccccatcctgttcagtaacactgcagcgctgtaggaatctccttccatctcagtaatgagatggaatagagcaagaaatcctgtgcatgattgtgtgtacttacagatttcagaagcctatgaaaagatactaagccagggtttgttaaggggatggcgagaatcagactaacaagagtccaagcccccttcctttgctcattattattggcttgtgtgacagtaactgggtataaattatgtagttcagtaataccagctcccagcatcaacatgagctatcctcctgcctcaactcccagccccgagggtttgtggcattgttctaaagactgtcaacttgaattctttccatttgcttctcggttgacaggcagcattcgtaaagggacagctgccatgtggctgtttctgttatatttgtagcaggagcctggcttgggtttggagagcctctggggaggctgagcctctgaggaatcacaacagatggctttattgaggagctaacaggcgtgggagtagatgcaggaagtggaaagacacaccagctgggagttgtatgtctgctagtcctaaaggaacttgatggggacttcatgattgcctgagctatattatgtacatagaaaaaaatggagatgaagatgttgtgaaatcaaattataattgtgaagactttaaaatgaaggagcctgtcactgccctgtgaatgggagactcatcctctggcagcgcctgtgaatgggataccaattagccaaggcatagttgggcatgaaacctggtagtaggatgtttatctagaaggtgcagtgctctgggttcaatccacagtgccagcaaatgaacaaataaattggagatctgggtggatagctctgtgggtaaagcgcatgccatacaactgtgctgaccagagttcagatccccaggagccacattaaaaagctagctgtggtagagcacatgttcaatcccagatctcctccactgagatgggaggtgaagaaaagagaacagccagaagcctgagggtcagggagcctgcgtcatacaaaaaaaaaaaaaaaaaaaaaaaaaaacgaggtgaagatgagcctcagaggttttcctctaactttcacaccaaagaaaacgtgagattattgctggaatatacatggccccactgctggcttacacacagccccactccttaccgcacctcctatccccaacaacgatttaaaagaaaaaatctagctaagagaaaaacattctttcatgattcctaaataactgattttttttaaagttaggtattttcttcatttacatttccaatgctatcctaaaagtccctcatgcccccccccccactcccctacccactcactcccacttcttggnnnnnnnnnnnnnnnnnnnnttacctcaatgatggaatgtggttagcttatataagccaaataaaccctctcctctctaatttgcctttggttggaatgtattatcacagcaatagaaatccatctgaaacagaagcacccaattctgccttgcaaactggaactaaatacaactgagcattttaggagcataatggcagacaattaccatatgagagctgtgggtcaagaaaatggctttcctaatggttaaccaaacaagtttggaatattggaataaccataatggatagtgatggtcagtgctgtggtttgaatgagtatggctcccatagtctcataaatttgcaaacttggtccccatttggtagagccttttaggcaagatcaggagatgtgattgtgctggaaaaagtgtgtcactggaatgggagttgaggtttcaatagagtattgagattcacagtgatcagtctctaccctaaggatgtgaatcaagatatgagctctcagtcactcctttgttctgcaaccatgaactttaaccatctgaaatcataagccaaatcaaacacatgcttttataagttcctttagttttggtgttttatcacaggaatagaatagtaactaaaacagccagcaatagtgtagagatctattggaattattatactattttcctaattgtttggtttgaaatgtgactgtactgttcctagcaacaggatgctctcatatcagagtagacatgcttaaagttatatttgattaacatggtgatgaatgtttctcatcaacctattacaatgccttaaaattataaaaagcatggttgacatttggggataaactatgtgaaaatgccttttatcaaaataagtataggagcctatcctttgtatcaagtaatgaaaacacaagtgccttgtttatcttatctttttttgttttgttttgttttgtttttcttttttaattttaattaggtattttcttcatttacatttccaatgctatcccaaaagtcccccataccccccccactcccctacccactcactcccacttcttggccctggcgttccccctgtactggaacaccagggccaaataactgcttttgaaatcatattgtgcctgcttttagactggtgtgtggaagggtcatgcagagcactaataaatggggacttggggagtcacaaattcctctaattgccaatgtctagccaaaaatgattcctgtttgggtggggcagatgcattccttcaatcttaacaaaagcttcctttctctttaaacacaatggattctaaaactcaacgtaggtcagttcagttcctatgatatgcattcttcagcaattaatatggcattaatatttaagaaccactggcctgaagcaaatcttactttgaaaagtattctgagttttgtttccttcccagtgttcaaagggaactcccatcggtgagaatgccatgggaactgggctgagcatgaatatccatctatactttcaaaagcatctctaggtcaccagaaatagcatctgatgcagccagcaaaggtttgcttcccctgcttggtctttaagagtgtgttcagaggtgtttacgggtaggaacataggcaatcaaatggagggaaggtactaaaatgtgagatactgttagcaggcttgggtacttatgatgcaaagacactcacaagatattaatggatgcttccttatacagtatcaccacaacaggaagtcagagaacttcctgtaacatctaccacaacaggaannnnnnnnnnnnnnnnnnnncagttcagttcctatgatatgcattcttcagcaattaatatggccattaatatttaagaacccactgggcctgaagcaaatcttactttgaaaagtattctgagttttgtttccttccccagtgttcaaagggaactcccatcggtgagaatgccatgggaactgggctgagcatgaatatccatctatactttcaaaagcatctctaggtcaccagaaatagcatctgatgcagccagcaaaggtttgcttccctgcttggtctttaagagtgtgttcagaggtgtttacgggtaggaacataggcaatcaaatggagggaaggtactaaaatgtgagatctgttagcaggcttgggtacttatgatgcaaagacactcacaagatattaatggatgcttccttatacagtatcaccacaacagtgaagtcagagtaacttcctgtaacatctaccacaacaggaagtcagagattctgaggcatcagctggaggaggctggcagcaaagctaggttacactctgttgctgtttttttctaattccagtttaaagggaaatgtttttatagctccaagtgaaaaataatctcaatagattgaagaaccaacaaagttttttattcttagatgataaaaagggaacctaggaagaaatggatttctagggtgcggaatcaagaaaaatcagcgctactgggccctgaagatgttcccccaacacataaaaaaatgatatcagtcctttgttttctgagagtgtagttttaaaatgaaaacataacaccaactttgtactgaatgtttactgagccccagatagtgccaggcaggaatccaattatgatcgcagagagagccctaggggtcattccacagtgaagctatttccagcactgctctaagcatcctttcagatgggctatgatcccatcagtgttcaaagaatgaagagcatcttcaaaatggagagcagttagcattaaagctgaaacttggaatatccatggctatgcacatgtgctccaacacagacaaacagatgcacatgtgggcacatgcacacacacacacatggagcgtgcacatgcgtgcacccttgtgggaatctctaccattcttctgccactttgcagtttttctgctgagaagtcggttgtcaattcttcctgatgctttattccttttctcttggtttgcatctgtcaagatgtcaaacgctaaaacgggatcatcttccttctgactctttgtttctatggtgacttaggttgggagagccatggcaaagcctgttagaagtgtgcctgagatggattccgagtgatagcttggaagtttagctatgagcagaaggcatgagggtcagtatgaaatgctgtaacatgcacttaactggatcctctcttgtgccctgggacttccagtgtgtcgcaaaaaggcaggtatcactgaaccaaagtcagtgggggaagccttgttggttgattatagctgagatataatttcaaatattctatcttgccaaggaacacaattcaaccattccaagaaacaaagaggtggcatagcaaatgtacaaattcagcaaagtgctttcgatgcttattaaattaaattgcaagtaagtagctccctcctactgagattaaaaaatggagaaagacaaaagcacaaaaagtacatcctcttagataggtcaggctcaacaattactacacataaattatttagcccatgtaatggaatagttaagctaagaactaaggcattagattacctgagatctaacctctgcttcgtgcaacagtgtgaccttgaacagattaatctctttgtgcctcagtgtactcatgcataaacgggatgctcctaagaccgccatgtcagcacttaaacgcaataatgcaggcagtaactgctctgttacaattgttggcacacagtgctggacgtggagagagcaatgtctggagaacaatgaggctccaagtgccccggttggtctgaggaggagtgatttggaagacctcccattccaagtaccctttctcctacttacccagaaaccagaaggcataaagccctgagttctagccagaacccaggcaagttagcacatgtttgtaatgctgatgtctgggttatcagactccctatgcaagattcctagctaactcaactagttccaggccagtaagggtccatctctaaaaatcaaaagaagaaagtaggtggttccatagaaacaacagatgagataacttctggcctctacctacatatatatacatatacatacacatacacatcacacatacacatacacatacacatacacatacacatacacatacacatacacatacacatatacatatacatcatatacatatacatgaacatcatatacattcacacacacatatatatacacacacatatatgtatcgcatatatacacacatatatatgtatatatatatatgcatgcataatttcacatacatgtatcctgaatgcatgtgtgttcgcaattgaacatgcatacatacatacacacaaaggataatagacaatttacgcttactgtcatttaatgtttagtcatacaattagtagttacaactttatattttgaagaggaagctaggcattttggattttattcacttgacaaaatacagccacagcttctgcccagtttcagcctggaactaagctgtgagttcccactagctggggctgcagtggcttcccaggtgatgttgaatgctctcagaggctccagtctctttatggctggaaagaagagcagcttgcccattgcagaggaagcaacactatcaggaaatcaaacaattgggcactaatttgtttcctgccctgccctagtaagtcaccgccagtgtcgaatcaccatgggaacatatactcttgctggaatttggaggctccaggccactgatgtgccaattgctttcactcggggttctagtctgtaatttatcattgggagtgtgctgccctgctcaaacgcgccctttgtgggcagaggcaaagctaatatactttcccaagtgcgtttgaattgcttcaataaatcagggctgccagtgtaagcagtttttatcatttgggcaggacaataagttatcttcatgctttggagacacaggctctccaagacttttatttgtgtaaattataatgcatcataacccatttcttaaaatgaaattaagaagctcacaacggggtgtgttttttaagaggcaagggacatacaccaaagatagcgggcgatccaatgaaggaagagagctctttatcctgcttgttttatagcagtattttatttccttatcattggcacagtgatgtgaacattaaatgcttgtagcagggttaaatttcgtctggctctttattgcctcagtgtttctgtgaaaacagcacagcgggacaaatgaaagggggactaagtgtaagatattcttcttagggaatggggacgtagctctgctgataaaatgctttctgtgagggtccgggatcagatctccagcaccaacataaggagcgagctgtggcagtgcacacctgtaacccagacgctggggaggtggcaacaagtggatcctttgtgctcagtggccaactggcttagctgagtgtctgagcttctgggtgcagtgagagatcctgtctcaaaaaacacagtggtgagtgattgaggaagacacttgtgcatggactgctggtggtcacatgtgtgtgcttgtaactgcatgagtgtcctgtgtaaacacacacaagcatacatacaacacatgccacacaccacacacacaccacacaaacacaatacacacatataccacacacacacactacacacaaacacacacacacaccacacaaacacaccacacacacaccacacacacacacacacaaaccacacaaacacaccacacacacatacaccacacacacacacacaaacacaccacacacacacacataccacacaaacacactacacacatacaccacacacaccacacacacaaaacacacgcacacacacacacacacacacacacaccacacaaacatactacacacatacaccacacacacacacaccacaaacacaccacacacatgtaccatactcacatataccacacacacaaacataacacttgtatatgccatgttggatgcttgaaaaacttgtggtttgacacaaatttatgccttgtcagttctgttagacgacttttgcaatcaatgaggttatggaatcaaatgatttcccctagtgttctctggaaccaggtctgaatctcttagtccttctgccagccactgagcttagattcggagtgtgtctgatttgaatatttgagatccctgattgggaagataaatgtgttacataacagcacagtgtctgaggttcccaataaggaaaatgcaatctacttttgatattgtttggggactctattcaggatgatggacaataaagtctgttactttttattggattgacggaaaagctgcttgatatctataaactaactctgccatcactttggtacgtgataagaaagtacttttgcctgtaattgcaccaatagctcactctgagaaaatgatgttgacaaagaggccaggttttagagcaactggcagcagttctgttcagaaaccaagcttgtttggttggtctggtttttgttattgtttttgttctgttcattctataccacaggagattcaattctgtgttagaaagaggtgtgactggtgtgcattagctcctgagttcaatctccagtacttcagagggagagacagaatcagagacaaagacagacagacagacacacacacagacggagacagagagagacagagacagagatggatacagagagagagacagagaaaagagacagaaacagaggcagagagacaagaggcagagacagggagacataaagaggtggagactgagatacagaaacagagagagaaaaagaaataaaacagtattttcaggcattttatgtttgaattagtttgaaatctctctccatttatcaacaagatggactcatgtggcctgacataaaatttcaggttgtggctcatcttaatttgaggtggccgtttatttttatgtcaaaacactcagcgaccattatgaagaacttcagtgcctcacaagccttccccatgcctcatcccagggtctctcaagcatttccctagagtcagacagggtgctgcccctggcctctgagcagttaaccataaatgccagcaccactgtggtaatcaggctcatccatgacttttctcttcccatttcttctgctccctcggatgcttcctgactctctcagctgcccccagtctgaggcctaagtcagacgaagctcaggctactgaagtactgcaggggtttctgatatgtgtgtgtgtgtgtgtgtgtgtgtgtgtgtgtgtgtgtgtgtgtgtaaggtgtaagctgcagattctacgggttctgaacatgcagaactacttactgcctttgttgtgtcttctcatttccccaaaccctcgccttatgtttcccctctgtccatgcgcatgggtagaagggctggttttcctctttactagaagttactcaatacacaaaatctatcctcaaacagtaaatagaagtattgctcttttcaaatctgtttattttacacacatggcactacctaatgttaagatacaattagtccatatctctttctaaaaaccaattattatatatctctactgggggtgggctggaaagagggaactgatatttggtttatggtaatgtcattgattttaatagaaatttatctttgcaagaaaagaggagagtaatttcccacctcccacctttggaggattcactccaatatgcctctagatagttgaaactgcaggcattctgcaccccatggaattagtatcccatgaagtccctgcctctgactcacacccatgatagagcttaatgtgtaaatagccacaactaaagcatatcacctcagccagaaacatagcgttggcttcaccagcaggcaaagcctctcctgctgttttttttttagtgtgagttatttaaagcctctttctgagtctgtacagcatggcttactttgctctaaagggattgctgtcacacattttggagatctctggctgaagttgtctgtaggccgaatgctttctcagtatatgtggttgtcacaaggagacatgtcttcagttcatgtctacccacagataagatggctttctcctctttttctctgtatgcaccctggagggggtttaccttatgcagtataaccaccaaagaacgtccttttcttttcccaaacaataatataataccagggagtccttttaccacatatattggcaacatcggcacaatgactgcctttctttccttaataggtctagatctttgctcatcccatttgaaagaaacactttatggcttccgtttggcatgcccaaatctttttttttttccattttttattaggtatttagctcatttacatttccaatgctataccaaaaagtcccccatacccacccaccccaactcccctacccacccactccccctttttggccctggcgttcccctgtactggggcatatacagtttgcgtgtccaatgggcctctctttccagtgatggccgactaggccatcttttgatatatatgcagctagagtcaagagctccggggtactggttagttcataatgttgttccacctatagggttgcagatccctttagctccttgggtattttctctagctcctccattgggagccctgtgatccatcccattagctgaggcatgcccaaatcttaggccttgtatttgttgccctttggctctggtcttagtaaaatgcaggtaggtcacttactgtcatagataatctttgttgtcagcttgacatactagggaaagggaaccctcccatttagaaattgtgtccatcagattggcctaaggccatttcttgattgcaaaggctaaggcgatcttgtattgctaaattcattttgaaaggcccagcccactgtaggtggtgccatcccctaagcaagggactcctgggcagaagggtaggtaaacatgggtcttgagacaagccaataagcagcattcctccatggtttctgcttcaagctactgcttgagtacctgccctaccttcttagatgatgaactgtgtgtaacctatgggctgaagtcaactctttcctccccatgttggctttggtcagcgttttatgacagcaacagaaagtgaatagagcatctggtcacagatcatgaacccctacatcactagatctcttagcaggaactcagctaagggactgacagacatactggacactggagacaggacacagacacagaaatattagtactgtgtcctcgccactcacaataggagacaatttaaattgtatgaattatgtatttctgggattcttctatctatactttaattagctgtggataactaaaactatgaaaaatactaaatgggagcctgtggacaaagggctgacaactatatattgaaaaatagtaaggttatttcatagaggaagtaattagtaagaccatccaaaatttgctttaggggctgaaggtgtagattagcagtagactgctaatgtactgtgcacacacacagcccagggttctatccctaacatttctagaggtgacttttttatgaataattgtattttggcatagtgagttctatattttgtaagtgtttaattgggcatgatttattctaaattgtcttttcacaagaaaggccacctgcatggcttctaaatgatgaccgtattagagtattactacaacaaagcctgtatcattaaacacaatttattgtcccaattgccagcatgctcctaaaattcatcttaaaaagagtatttatttaaagagttggtaatatcacattctataagtaaattcccacgggctaaaataacagaatttggtctcttgcatatcaatctcttctaagccaaagtggaagagaaagggaaatgattgctggggccagaaaacacccctttagcccaaaggagaaagtaatagacttagaccagtatacttcactgagcaacagacaaaatcatgaccagcagaaccatgtacagcattaaaaaaatgaaccactggaatctccaattgggttgagtcctggattggttagggtgagctatagatgtaattcctcatcctgggaatacctggcatacaaacgaaagcagctctggttgtcatattgcagctagtttgcttggccttgccattctgctcttctggccttttcggtacagtggatcaacatctttttgtttgagggtgctgcatggatcagccttgtactggagatctgttccctttctgatctttaagtcacagccttttctctacagtgatcactaatcttgaagaacatccttctgggacacacacactccctctttccttctttctcattttctcatctctgtgtgtgagaccatgcactcatgcatactgcacagccattcttcagggaggaatgactaacaaagataatgtctcagagcccaatgaatgaggaataacacttctcatgagaaacggctttctgctctaggagaccatggaaagtgaccaacatcttgccctcctattcactaagaaatccttcccacagaacatccaagtgactggtctatatggagttctatcaactaaggatacaagttctggggaagagaaggatggtttagcttataaaacctgatgacctcagtttgactccctaggaaacctacatagtacaagggagaaaagtagagaatcaatacctctacatgtatattacacacactcacacactcacacactcacacacacatacacacatacacacacacacacaggactgaataaataaataaatgagtgaataagtaaatcacataaataaataagtgtaaataaataaaaaaattaaaagtttttaaatgcacaacaatatcctactcctgcttggaaaattgaaatccctgtgatgagcaatagctgcctcatctctaacctgggcagtgaccccacctcagtgtccttctatcaaggcatctattccaaatctctaatgactttgaagttccaaaattcaaaaaattttcatagccaaggtagaatattgaattcctggtagcatgctcttttgttttcactccatccaagaaccaactcctttaaattcccaattttgtaccatcttttgttggtgaggtactctgtggctggctgcatgccctcagtcattaacctaagtgacagctgtcagactgtagttttgatcttggtagtcatgggctggtggtgctgagactatctgtgtgtataattgcaggctcctggttgtactttcaggccaaatttctttgctaccagccagggagaaagagcacaccctgtagctagaacctcgtcaggggaaacagaaaggcagtttgacagagaaggcaaaatgtaagcgtatatggtagtttaactcaaaaacgttaaacattggtttctaaggacaaaagtcaaaagcatgcaggtcttttgagaatgcttggaagtgtgacccccatgggaagaggttttgcagtctaggtcgaggtgactcatgcctcagggttcccatgcctctgttaacagaactcagtggatccaggcagatctgaaagagactacaaagccttttgattaggtagcaggctacaaaccactcatctgaaaaggtgttgcttagttttgctgctggggactcaagatacatttgtttcatgctttgcttcctagcataacccaaactgggcgtttacacattcttttgaggtcccaggaaagactagaatctacctctaggtagaggcgaaccagtgtcacccctaagagttaatccagttaggtgagtcgatcacccaattggctacccctcaggaaaaagggcttgcattaagctatgccaaagagatggggaggaataattatccctttaatgaaatgcatccctttcccttcccagaatctcccactgtcagtgcagttgctgcagaacccaccatgatgttctgttggggtgtgttctgagtcctaataaaaaaagatacaactttttacttctctctctctctctctcttttttttttttttatcgtggatgccggctagtgtctaaggtatctgaggcagcttcaccttctctaaagctcctgcccccttccgtgtggctgcttgtcccaaagagggacacctccaatgtcaacttaactcaaaaggcatagttctttgtctcctcccctatctttctcctctggggagtgttgagatgtacagcttgcctgcccagggttttcttttaaattgatgaaattgtctttgagcttcctattgactcaaactcatggattgtcttattaacaagactcagaactccagaaagatccttggtttcctcagtagcatgtggtgactctactgggactcccccaaatatctagtaacatcacaggactctgaagtcatcctagaagatgggaaactgaggcaggagtgtgtcagcacttcctagcctggccttcatgcccttttcttgatgcagaggcatgctggtgtcctttgcttcctctgcgtggttcagcctggtttcactcagtagaaagaagttacctgaggtcaggagggagctctgcttccatttgtgaacactgctgtacaaggcaaactgtttatacacgcgtgctccatgcaggtgttgctcttcttggcaggtatggggtaaggaacgggaaaagactaagaagccacttactgaagggaaatagattttaaaaaaaacaacagaggggaacataacgtgctaaaaatgattagagtagccaaatattagcaaaacattctgaatgtcccccaggctattttttaatctgctgagtgaaactgatatagatgaagtttaatagactccaagaaaatccagtttacatcaggaaaaatagtacttaaaatgacttagtatcaaattttgttcaagcttgatgttatcactgctagtaacaaatgtatctgttatttaaagccattattaaagttcctcattttggctatagctggtatccactcctattcacaaatggaatctttgatgagtttgaagtatcgaatgtcagcacaggatattctcagatgtaagcaaaagaaaagatacttgagtggaaaatgacttccaagaagtgctggagaagtttatttcaatttgttagcccttaattgctgtaataaagctatcatacctgaactatatgaagtttacatctaaaccttatgaactttatgtgatcataaatacatgctcaaagtgacccacagtgtaaacacttagatgtatatccccggtgaagacacgggccagaagacctgcagggagacataccccccaagtcaggcttcaacctggcactcaggtggccaggcgtatagtgaatggccagcttgctggtgtccatttcagcagcaggtctgtttcttcattcctaagggattcatcaccctcctgccatatcttttataaaaaacaccctaacctataaccacagcactcagagtgaggcagaattgccaggatgtcaggtgtggctacagagcccctgtctcaagttcaaaattatccaaagccaggatgtctgtattctgtccaatgtacctgctctccaggaaatgatcccctcttgttatcccgattactgtgggcaagtcttctgtataccagtcccagacatgcatgctaattaaggatttttgggtacctggaaacaacagctgggagcttttcctgggctcctggattggataataccctcaggggtgcagagcacatgccaggaaccttgttagtctgaccttccagtagttgattcctggggacagaaatttgacatcaatttggtttgtgattcctgttgcctacaggaaatctgtccttcataaatgcttggaggttttactgaagctagctcaggaagggattctgactttgttggcatgtctccaccataatgtatcatgtatcatggaaggcagaggcagggttgacagtttgagtgtagtctggacttcaaggagagacaccgtctcaccaaaccaaacaatgggcaaacttctcaaggatagtatcctatcagtaagaatggagcctggccagtgaacgctagtcatggtatattcttacctgcaagcaaactcttaatttcaaagcatgggggtttaaactagccaaatatgaagagatagctcagggttagaagactttctgctcttgcagagaacccaggtttggttctcagcacccacatgactctcatgaccatttgtaactccagttccaggttatcaagtgtcttcctttagaatctgtaagctggacatgtgagctatgtccatacatacattcaaagggacactcaagctcattaaaaaatcattaaaacatcctaagcaactgaaggattttctgtatgcagattagaaagggtaacacccctagctgactctcaccagatcctctcagattgggtgtcatcaattgtatgcagtatagcgaatggaaatagaggtttggcctagtatgggaagtaattgcctcaggtatgcaaataatcctgaaggctaggccctaaacatattacctctcataaggacaatttgtgccttcaaagggcaagcaagcaaaacaaaacaaaacaaaacaaaacaaacccaaagaacagtaattatgcttgtgtttccccttcccccacaagctttgtccagtggatgagagcgtgtgccggccatgacatcattagacacaccatggtggctctggagtatgaagtagctgctctcacagacaggagaggacgctgttgctgtcctcatttatctttaagctcctctactgtatccttcatcatgatcttgttaataatgccaggccaccgaggactttgcagttgatgaaattttatcttaccagcttttccagtgggcctcacctgcagaaattccagccttccttaattaaaatttgattctcaaaggaatccactatatgtgtattataatacaagggaatgatcatgctggggtctgtggctacatctgtttagatgtggacacaggtagctttgggttatctcctgtcattaccaagacagtatccaaggagaggttcctctgtgtgtgtgtgtgtgtgtgtgtgtgtgtgtgtgtgtgtgtgtgtgtgtgtgtggtgcccacatggaagtatttgtgtgcacattgttagttaggctagtacaggatatcctctgtcactctccaggttgttctctggaggcaggctctctcaccaggctggaagtccaacttttcagctagcctaacaggccaaggcattcccaggatggcctggctctcctgtcctataatggggggtgacaggcacatgcaaccatgcctggctttaaatgggtgcctaggaatctgaactcaggtcctcatgcttgcatgaaccatctgccctggtgaaccatctccctactgcccaagattctgatggccccattaaaatacatgtagcccaggatggcttcaagctcactgtgcacctgaggcaagctttgagatcctggtcttccagcttccaggattacaggcgtaaggcagtgcctgcagcctgtctgtactggaggtcagattgatggcaatgcgtaaaagcctaactgctcaattccatattctttgtaaatgaaactacagctaagacggaagccattcctaaagcggtgcttatagacttaataacagattcactgacttcgtggagcagtgatgtctctacacaaaaataaataaataaaaacaaaacacaactgggaaatgttaactagaatgtgagaaaaatattgagccatgtattttgtattttgggtctttcttctcaggcaaacttccggtgtacatttaatccacaaaggactctctgaaaaatatctcactttgtttattatctctcctgaatctcatagatgcctgaacttgtctgggtaacagtgagtggctctttatggttgtgaatgtattccatgctctctcttgctcagctctccttccctccctgtcctcctcctttcctccttcccccatttcccctctctctcctctctcctctcctcctcctcctcctccatctcttcttcttcttcttcttcttcttcttcttcttcttcttcttcttcttcttcttcttcttcttcttcttcttcttcttttcttcttcttcttcttttcttcttcttcttcttcttcttcttcttcttcttcttcttcttnnnnnnnnnnnnnnnnnnnnnnnnnnnnnnnnnnnnnnnnnnnnnnnnnnnnnnnnnnnnnnnnnnnnnnnnnnnnnnnnnnnnnnnnnnnnnnnnnnnnnnnnnnnnnnnnnnnnnnnnnnnnnnnnnnnnnnnnnnnnnnnnnnnnnnnnnnnnnnnnnnnnnnnnnnnnnnnnnnnnnnnnnnnnnnnnnnnnnnnnnnnnnnnnnnnnnnnnnnnnnnnnnnnnnnnnnnnnnnnnnnnnnnnnnnnnnnnnnnnnnnnnnnnnnnnnnnnnnnnnnnnnnnnnnnnnnnnnnnnnnnnnnnnnnnnnnnnnnnnnnnnnnnnnnnnnnnnnnnnnnnnnnnnnnnnnnnnnnnnnnnnnnnnnnnnnnnnnnnctcctcctcctcctcctcctcctcctcctcctcctcttcttcttcttcttcttcttcttcttcttcttcttcttctctctctctctctctctctctctctctctctctctctctccctcccttcctccctccctccctctttctctctccccattttaaaactaagactcttgcagggggcttgacttagatgtgggagtctccgtttgaattgttccactaacctgcacaactgttgcatttggaactcacagcatcagtggttatcagtgtaaaacctgcccaaggcagagcccatcaagtcaataatccatcatgagcaaattgttcttaagtccccaccctccctcaggagcagttaaagttataaataaagagttataagtaactcattttattataaatgtatttaagattataaattataaccttaaataaataagtgcccctcttgctaacgcaggcagccttgtctgcaaagagcacaacaaaaatagacaggagagcaggagaaggacttgggcggagggattcggtgggagagggatggtggtgagacaggtaaaggctttgattaaaaagtattgtatacatacatatgtatgaaacagtggaagaataaacgaggggtcggggagatggtccggtgataaagaacatgtactgctcttgcagagggcccaagttttattctcaggtggccttatagtgctctctctctctctctctcccctccctccctcaccttcccatcccctctccctctcccctctctctccctctctttatatagagatagataatttaaaatcttttaaaaataacatttaaaaaaactatgctacatctcaaagatgcaaaatgtggactgctcatgtttccttctagattgggtgttctgatttccaaatttgacacccaaaatttgtgtcattcttaaaggcagggaaatgtcacataagatgctttggcaggagcctgagtgtaactgatcagaagggcaggacttcccaagctcagcaccactcagtctatgccctaagcatccagggtccaggctctgccctttctcactaggacctattgtttagttacactgctctcctcttttgaggattagtgagaaaagcaagcagtgatcaccgaaactgtgcttgaggtggccgggatttctgctcaatttaaaggagattaatgcaataaatcagtataaccactttatacagccgagaacagtgcttttgaagatgatgtgctcttagtgagtagcccagaaacggaaatcagtcaacactctgtgactcagccatgttacctggttggctctgtttgccacttaatcaaccaccaagcataagtatgtgtgtgtgagcgtgtatatgtgtgtaaatgggtatgtgtgggtacatgtattgagaatgtatccatgtgtgtgtgtatgcatgtgagtgtgtgtatgtgtgtgtacatgtgtatgtatgtgaatgtgtgtatgtgtatatgtgagtgtatgtatgtgtgtatatgtgtatgagtgtgtatgtgtgtatgcgtgtatatgcaagtgagtatatatgtgtatgagagtatgtgcatgtgagtgtgtatgtgtatgagtgtatatgtgcatgagtgtgtgtgtgcatatgctgtgtgctcatacatgttcttgagtgtgagcacagatgcacacttcccaggtcacacacttggcagtgagaggacattttctggtactggtcctcatcttttacctggtttgaaacaggttgttcactgctgagtgcacaggctgctaagtggttggctcttctcctgtctccatcctctgattggtcacctacgtgcgccacccattgtgcctggcttttatgtaggttttagaaattcaaacacgggccctcatgtttgcacagcacacatgttagtcactgagccacctcccccaaccctatcgaaccattttggagccacaaattttttgacacaacaaatagggagtaaagacagaaagaaagcaaggctaaagatacatcatgtcaatcttggcactagtgaagctgaggcaggagaactacgagtttcagatcagtctaagccaatagttctcgaacttcctaatgctgcaaccctttaatatagtttttcatgctgtggtgaccccgcccccaccataaaattattccattgttacttcataacattaatgttgctattgttatgaatcctaatgtaaatttcttgtatacagaatatctgacccgcaaaactactggtctaagttgtgtaatgagatcttatctcagaagctcagataaataaaaggataaagaaaagcaaacactgtaatgtaatttctgaaaaaaaaatcacaaaatgagtaacattttacaaactcatttcaaggcaactttttattgtagtcattaaagcatacatatgcatacatataaatacatttgaatgtgcatatgtgcacatgtatgtgtgtgatatgtctacatgcaatatagtcattatgtaatttattatttaaactatacacagttgaaagggattttttaaagacgtctttatttttatttcatatgtacgagtgtttgcctgcatggatgtctgtgtaccgcatgtgtgcctgagaccagaagagaggactggattcttggaactggtgttataagtggttgtgagctatcaggtggttgctaggaactgagtctgggtcctccataagagcagctcgagctgttgagctatctttccagcctcaagggggttatggataattactttacagcatctcacttacagggacatatggcctcctatataaaattttcctctttttaaaataaagcatcagaaccaagatgtgtagattctaatctccattgtattcaatgtatcttctaatgtgtattaaattggggaataatgactaaaattaaataaatcttgtcaaagttgaagagaagaaaccagtgactccctagcccggcttctgttgagaaggcataaaggctgcctctaatccacatggggtttggaggatacatggttgcagtgagcagcgtgaatccttttctcttagccagaaatcaggaacaaaatgcaaaaatccatcaaaatcaaccagtcaggagactcaagcacaaggatgggggaattcaaggctagcctgggctacatagtgagtttcaagagtagccagaaaaacagtgaaatcatgtctcaagacagctgatttaagattcttatatttttgttcttcaaaggtgtttgtgttcatttatcattcatttgttccttagcccaacgtctcaatatatattcgctcaggcttcatgataattttaaaagtatatgaagtcaattaaaacttcatagatcaactagtagaggtaggaaaagtcaatctgtgtcgtatatgtaatgagagttatttaactctgcatttgaaagatgagtagagagaacgtatagcatattcattgaaagtattatgttttcttaaaagagtaatcgtttacctaacacaaacattataaggggactagattagaaatgacttgggaagtagaagtctgaccttgacccagttctctggcatgctggctggcaagaagcatttatgattccttgagctagcacagctgccaggggatccctaggagagggtgtctgaagtgaagagagaggtttcatttaattagccaccaggaaaatatttaagatgctagtctgtttacatctgatgtctgctcatcatctttggtagatgagaaggccgtgtgtgttgtgtacatgtgtgtgtatccgagtatgtttctgtgtgtgagagtatgtgtatgtgcacatgccaatatatgaattaatgtatgttagtccgtgtgaatcaatatatagtgtggtcataccatggtgcatgtgtgtaggtcagaggatgacctcaagtatcagtctatgccttctgtctgatttgagataagtaaggttccacttgggggttcgctttgtttgttttctgctgactatgccagactagctatccatgaacttctgggaagtctccacagcaagagttttacccaccgagtcatccctctagcctctctaaaaagactttacgtgagggtaaagttcaccttctcctgaagactttgatagcaaaaagctaagctacagggtgggcaagctttggtttggaaacaaaagacagagaactggattgctctcctccatgctggcaagaagtttccagtttctccaagtctctgctgatgctgatgctgatgctgatggctagactctgtttggaacccagatgcctggttgttcttacactgcagcccagaactcagggacataccaggacttggagcctgggctgcacaagcccatccaaataatatgtgctggttggtggcgccttgctagaagcagcttaccccttctgttctccactgacctaggtgcttagccaccatttgcatcccaagctgcttcagccaatagagatgaacaattcctttataatgtataggcaaaacagcatattcattgaattcatcaggccccttgccttggaactgttcttcctcggtggtccatgcagagtttgtgagctaaaacctgggtgctggtagctagaaggaacatttccaagacttttgttcgttggttggtttgtttgttgggatggggaaaaggagggggcaggggaaggtcccccacaggatattctcaatatccagtttgctttccgctaaaagtgtaattatggatggagcaaaagcttccccaccaactgagttgacaaggccaatcaccacggggtaaatgtgtgttgaggaaatcaccttagcctgcaccttgcctgagcttccccaaagccccaggaggtagggaatcatttgcttctggtttatagggggaaaagagtctgggaactagaagccgtgggcctaggtattggcatgcagtttctaattatggactccgtgaccttttccaataagaaacacactgaaacttggactacaaagtcaacaaagcttcctgcgagggttccttcatacagtctccccttgctgagctgatggttgcattaaatctttgatcagggctagaggtgtgatttggtggtagaataagtgtttagcacaggactctgttctagccacagcatcaataaataagtacggaaggaagaaacgttggttaggtgtactataagcttgagactaatttacagaacatctccttcgcctgatatacttactgcaacacaagactgggcgggagctagcagagacagagaccttcactcaccctttcttcacttcccccgtggttaacattctgcatcaaatcaaagaaaatgtcaaatttaacacagtaagcagcgcaacttgagttgagtcataatatattttttctctttcccctaggatatttagacagtgacattacttaatagcacccccctatgttataatcaattgcccaccaatttcaccgtttccaaagggagggccaagcactcaggcagggagtcaaatattctaccctaatgtctagtgacacataaatttgaaagttaacatttatttaattgccaaagcggtcatgctaagtgcatagtctgacatactgttggatgttaaaaatgatcatttttgagacaggaaaaggtctataaaatcaagaaacagggctggagagatagcttggatattaaaagcacttattatggcagagaactcaggttcaattcccagcacccacaatggtggctcaaaactgtccctacctccactcccagaggatccaacttttagcctctgtgggcaccaggcatgcatgtgatacacagatagacatgcaagaaagctactcataccataaatcaatgttcaacattgttaaaaggaaacaaagacaatatactatttgacgcacgagccaactcgtgctcccttttaagatcttcatttgtgcaaattggcccagtcacttgggcagtgcttcttgatgtgacatttctgtcctctaaagggaaggactgtggtgataacaaagctagccagcacctcatcctttcctaactctctagactgcctctctcagcttactttgccctatggcttctaggtaaaacacgccaatgtaaggcgtgtcctgacagagatccaagggcagaagaacattgaaaggagcagagctgcctgcattgctgtgatgctcattctgacagccagccccttccttcagctcttgctttcttcagtgtcctggcggggccctgaggccataccccaagtcaccagtaccagggacatcacctcagctcttctggctaactcttcatgaccttaacattctactcagtttttttttcctacctcatttttacttcctgtacaatgagagcagtgactgtgccctactttataaactgtttaagccagtgagggcggggagacacgagagtacatatcaacctggatacagaaagaacgcttgatttgcccatatcaatatatccagcgtggtctctgctccctcaccacatggtcacctcagagtgtctgatggttaaataacttaatggtccaggttcccagccaaggaatgatgcttcccacagtaggccatttctgcatcccagttaatgaagtttaaacaatccccaacagatatgcccagagagccatctcccaagcacttctagagttggtcaagttgacaatgaacaataaaccatgccattaaaagaagagccaaagccagttagggagtgaagaatatagctctttgttaagaagaccaacacatgcttgagaaaaaggttccaagtaagtgaaaagtggtttaaggccactcaaagtgggaatacagaggggaaagcaatgacgatgacatatcttggctactgcctgccattcgcaattagtccatgtctctcaccaaagggcagactatcctgacctcctcaacacaaagactgagactattttacaaataaagtgaaattacagagaaggaatacattcattattaagctgatttttttccccagaaaagtatgaaatggtcatcagtaggaattcaaaggcagatggatggagcttaacatcttttcctaatccagataactatctacttcgtgaaagttcagtaaatatcaaaatcatatctcttttcttctctttctctctctctttaagacatgtcttcatgtgtgcagatgcatgtagaggcctgaaaacaaccttggtgtcatgaacaccatcatgctcctttgaggcagggcctctcattggtatgcagctccaccagttacctagactgtctggccagtgagcgctgggcatcctcctatatacacctccctagaacaaacattaaaaactcaagccaccatgcctagaatgctttagtatagtttgagacattgaactcaggttctagtgtttatgggtcaaacacttcaccaactgaattatcttttccagccctcaaagggagacctcaagctcagcatcaacttgtgaataacaacatttcaggatgtgacataacctgattgtaggaggatccctggggtctagtgctttgcagcgtaaccttcagtaggcattaaggttttgtagagacaagtcattgacctaggggaaacaatgctctagccagaagcaaaatggggaacccagattgcgcagtaaataaggaactgctttgagaagccagtctcaagcctttgggtggctggggccagcacagggccacacatggatacctttggtgtggtctcatggctaatcaaggaagggctagtttttgcagtccccaatgtttgcattgctgtatcaggctgagatgcagaagtttcctctattctccttagaatgggtagatctagctgtgttttgtgggcaaaatagtctaccaactgacagaaaatttctggcaatggtcttgtagccatctttataagctccagctgggagcttataaatcacttttaaccatgatggaaggctggtgttacccttcgatgccttgaggtgacaacaagagttaacaagtgactgatcagaaccatttctctccctaccctggagcaggccattaaagagtgaggctgctcagtatgcagcagagacagcctgcaggggtgtgcatgtgccggggcttgcatgctctgatgcatgtgtggaggtcagaggacaactgtcatcagatggttctcttcttccaccgtgggctccagggaccaaactcggatcatcaggtttgcatgacaagtgcatttacctgctgagccaccccatcagcccaagacaaactaatttgaatctgtgtgggcaggcctgtggatttctgataattgccttggcccagatttttaaaaagcacttgtaaatgacaattcctcatacatagaataaaagatctcccttagtgctattctgtcaatgatggttaggacttagatggttttacacatgcacaggaaattgtctcttgaccattgtttgagtgtatgacattgtctggcatccaggagcttttgtattgggttcttacctattgggatattgatgtaattacaaaatcacaaggaatcagaagtcatgttcccagctctaactgtaatgacaactttaaaaaatgtttagccttgggagagaggtcagtcagcagagtgcttgccatgcaagaataagtatttgagttcaaacttccatgttcaaaacaaaatctctctaaaccttgagaaaaaaatgaggaaccagatcatggttagcatgtagcatttgtatatggatatggataggaaatatatgtgtgtgtaaatgaaatacacacacacacacacacacacacacacacacaaggagtatctgtggcataaccacaaccaaaacaacaacaacaaaaaaaaaacaacaaaaaaaatccaaaacaacaacaaaaaaacccaaaaaccccttgtaattctttctccagtttccgtaaaagaatttagcttaattgtccaacttaataagtgctatggaatgtttcatcaagtcaaaaaggcccatcaattaagtttgagtggaaggttcatctgaaaacagaatttctcattgatctctactgaatagctggagagttatctctctttcctgtgtgttaaagaacactaatcatgtccacaaaatgaaaataaaatcatcttttccatcatattcttgcaggggcttgttgtgggggtgattggctggcttttcattatcatacagaattatcaaccagaattagcatacagcactgtcttgtgcttcacatccattttctgagttgtctagtgtcttcagccaagttggcagggaggaaagacccaagacgtgtcactgcatgattgaatgagacccatgatagtaatcagcaggctgagattgaaagttcagatcatccagaaagaagaatgaaggttctttatccccagcccccaaaaccctcttggtgtaaatgtgtgtaatgacagagggcctatagcaatgtgtagtcttattctactctctcctcattttaaaatcatttatcgtgtatcctctttcaaaatgcaaagacccttaactttatccctgtttcaaaagcagtaaaaatataccatcaaaatcctaacaagcctatgtgcctggctctttgcctggttctctgtccagcacttggcctctctgccatgatcctcctgggaaccattgtcttctgttgcccctgtttccatccaggtcactatcatttgctgaacataggctcaacacctctcttccacaatagctctgcagctctcttaattttctgagtcctctgttctctcacacacacacacacacacacacccttctctactctgggattccaggctcttctgatcctagcctttctaccactccttagacttctattgatttttcatttctgcaagttaatgcctgagtgttactgttacttataggtccatttccatagccatttcaggtgataataactcataaatgtagcatcctcaagaccagccatgttcttgtgacttccaaacctgtgcccaaagacaaaaatggcttgcctaagcttcagagcctttcactcatttgtttactaatagctaatatgcatttgtccctctagtgtctccaactcagttgctgtccttagttacatacaaatgtaactaagaggattactagatcttcattctctgccattcctctctgtacctgaatgacaggctacaacatctgccaacagtatttttggatgggtttcttatctctaccactactacattggctcagctgtgtcttcatcttctttctcggattactgttgttgtccccatggactctcaacctccaactctgcatctcccatgaatccagggatgtctttgtgaaagtgtccaccatttcaccgctccacttagatctacgctatcactctccattccagtctgatcttaaagcattaaattttcactttataagacagtgtttaaagccctacaatttgagcctgatttgcacttctgaccccttctacaatccctaatggaatctaaccacctttgaacttatttctcacatctctgggctttgcatgtatgaaccctgactcttcttacctcatacaacctcactaatattaaccactcatcttcctattggaagcttctgaagttgtgggtcatgaccccaaatgacatcacagaactgactgtggggataagttgtaaaaaaaaaaaaaaaaaaaaaaaaggagggttggtaataaaattctgaatatgtgaggaccaaagtaaactcggcatcaaattcggaatgaatccaagatttttctgagacaatatctgtcccttaagtaaaagctttcccagttgtagtcatagatagctacctacagattggatctgaggctgtggtagttatcttgaggtggttggccagggctggttacaccctaataccctgtagacatgcaggtcagtggtgctgatctcctggcctgtggcctccaggtgaaaagaattaagtcggtagaaataggtaccaaggggccagttatcatagccttctccatctttctcttgactctggcccctgccccccagcgtgttttggggaaagccttctgtctggctcagtgttctgccaccagccaggtgaatgcacagcatcaccattaacaggccagctgaggcacacgaaagctctctttccctctgaggccctaccctcattaagaaagtaaaatgttggtgagtcttgcgggcagccttcctccctctggattgtgggagatctctggctgtcagcatagcactctgggccaggaaagttcagagaattacttcaataatatgacagcctcttccatttaaaatggaattcagctcggcttccctcggagccttcattgaaattctgcacatgatccagccctctagtcatttaacaatgcctctcatgtttgccctgatttaagaaagaaagagaaaaggaaggagaaagagaaagtaaaagaaagaaagaacagagagcaagcaacccagctttctgtttgtgataactggatcagggtggtgtaattgcagggaggaggcccccaggctgacagtaataggatggctcctctgatgtgtgttaccatcagacgatgacctgtgcatggttgttctcgggggacagtaaagaggcttttaagaattactcactgtgaaggatgaaagctaatgaggaaaggagcaagtgaagagcagagagactcttcgggaagtctggcttcacttaggcctgtcatggctcccttcaaagtcattaggacgagtgggtctccaaaggagcactctgagcatcgtgcattctcatgcaggctcctcccaggtcaaggcacctccttcctgaggaattaaagccactaaataataaatatcaagggaaaggaaaggaacagatccagtaaggtgagagagggcatttatatcaaagaagatacagctcctaatgggcttctacggcaagagagaaaaagacagtccttatactctgtgtccttgtcttaaaggccaggcatagctcctgaatcgcatataccagcaggctggcagcttgtgttcgacttgggcactgttattaaaaacagaaaaatcagatgtgcctggggatctgcaaggatgcttgtgcagaatgtaggtggatatgtcttccaatgaagtgcccaaaagctgctctctgagcataaggtggtggtctacttcaggaacccacagagattctgcagtataaagctacatacttactttccttattcatagcctcctgggaccgaccacaaaggctggttgctgattctgggaagggcagtgtgtcctagagatgtagcctttgtagtgaaataaacctaaggaacacgttcacagcatccacacagtgagaacacatagcagtagcataagctccaaacatagtatcttgaaatggcctcgggcatggaggcttttgctttgtctccagcccctgatctgatattctagattgcttggtagtgggtttctcacacccatatttaccctcaaaatactatgagcactgcctccatctccagcccagtgctcttcctagagttaaaccagttgtccaggagggtttggtctgagtggaaatgacatagaattaagctacctgtggtaattctctcagctcaagacaacctagagttgcttgagaagagggcctccttgaaggatttgcagtgaacagttcagccttcggggagtctgcgagagatcgccttgattgttaattgaagtaggaatacccctcctaaatatgggcaataacctttcaggggctgctagaaattcaaaagctagctaagcaagtaactaagtagacagcatgggcttatccatttctctctgcttggactgtggctattaaaacactagttactgagtttctgcctcagtttccccttagtggtagacttcatttgagtgaataaccaacacaacaaaacaaaaataaccaacaataacaacaacaacaacaaaaccaaaccactctccttaagtttctattcatcggggtaagggtgtaacagaataaaactgaaagtcaccctgtctgatctaccaagaattttagagtgtaatccacttgaacagccaccgatttcattccactcccagaggctccacccactgtcctactgtctacaaaaagcagcctgcaggacagttcnnnnnnnnnnnnnnnnnnnnnnnnnnnnnnnnnnnnnnnnnnnnnnnnnnnnnnnnnnnnnnnnnnnnnnnnnnnnnnnnnnnnnnnnnnnnnnnnnnnnnnnnnnnnnnnnnnnnnnnnnnnnnnnnnnnnnnnnnnnnnnnnnnnnnnnnnnnnnnnnnnnnnnnnnnnnnnnnnnnnnnnnnnnnnnnnnnnnnnnnnnnnnnnnnnnnnnnnnnnnnnnnnnnnnnnnnnnnnnnnnnnnnnnnnnnnnnnnnnnnnnnnnnnnnnnnnnnnnnnnnnnnnnnnnnnnnnnnnnnnnnnnnnnnnnnnnnnnnnnnnnnnnnnnnnnnnnnnnnnnnnnnnnnnnnnnnnnnnnnnnnnnnnnnnagagagagagagagagagagagagagagagagagaatgagagctacagggtcagaagccacagcaaaaattctatttgtctctcctagtagctttgagactttgatgatttcctatatttttttaaagtcttccctcttcttgaatggtgtttcatgagagcaactgcttcttaggattctgtagcgccatgaaaaagcactttattctatcttggtcagagatcatgtgctaaacccctaagtgtaaggctggagtaccatgaatgattccaaagcaaaagaagatttagaagagtccataggagccaagaaccagcagataatggaaacttgcaataagagtggccagccccagacaagcaatttggcttcatgttcatgaccagcttcaccataatcaggaacctccatgatcccacagctcacctcagacaaaagagcagagttagaactcagaagcaagtccaaagacaattcctgcggaatgcagggatatgtgtaacttggctcagctgggatacctgtgtggcatatgtgcatgcctgtgtatttatgtgtgcataggtatatgtttgaaacgtgcatgtagaagcctgaagttgacaattggagtcttcttcagttgatcttcaattacccttctttgaggaagggtctctaagttgagcccagaactcaatgatatggctagccttgctagccagcttcctgtaggtatctattgtatctaccttccaagtgctggaaatgcaggcagactattgcccacccaacatttatgtaggttctggggaccagaactctcaccctcacatctgcatggcaagcactctacccactgaaccatcactcagaagggaggggaaatctatgtattaagtggactgttaactaatagcagaaaaagtcatccaccccattaggaacatctcactcaatctgaccacacgcgaatcccactgcttggatacataaagatagcccacgacctttctgagaaatgcattctcttgccaccctcctggatttcggttttgacaccatcagtcgcggagataacctgaaaccacaaatgctggatacggtttggctcatttcattcatttccaaagtgttatctgtggtaaagcttctaagggagagttaaaaaatcatttgcaacaatgggttgtgtcagatcacttgagttttcactgtattgaaacaggacaaactatacacacacacacacacacacacacacacacacacacacatatgtgtatacacacacacacacacacacacacacacacacatacattgcacactacagagtctccctttagcagagtcggctatttaaaggccatgaggcatccagtcacccttaaccctttcactttcagaaaactaaacgccacacaggacttgaaaattgaatcaatcttgactaggtatgaaataataataataaaaaaaacagctaatgtcttcatcatttcctgagcaagcctgtcaggcagaagggtgttgcttttttttttcttcctattttgtaagatgtattatagctgactaatcctccataaatatgaaagaatgatcgtttcacagctaccaattgacaaactggaacacatttttcatttgagcatgcaagataagcaggctgccaggggctctgccacctctgcctcagacaaagcctgtcccaggcaggagctgcttggttcattcttgggtcaccactatgttatttttagttctctgaatcttcacaggagttcagatcacatttcatctctgggactactctacagcccaccttccctagcataatttaaagaaatgggtacctccaattaaaccttccagatgtaaatttcttgcctggagagcgaattgagaagcgaatgggattcatgaatataaattgagcctcccttagcttccgttttcatcttgaaattgaagactattcgcctcccacacataaatccttatttgccttaagtgtgtttactgtgggaccccagtgcagggctggtagcatattgctatgcatagccaaaggtaactctcacaagtcattctgggatgaggcctggggaggcagaggccgcatgtagctgcatctgtgttcccagaaagaaagtagatagctctgcagcaggcagtgccctgtgcggtgatagggcaactcagcctccacatgctccgcctgtccttgagtatttccttcatttatctgcaaggggatttttttattctctctctctctctgtctctctgtctcagtctctctcagtctctctctctctctctctctctgtctctttctctttctctctctgtctctgtctctctttctctctctctctctctgaatatctttgcacccctcatagtttctcttcaccttagttttgagccctgatacacaactctcttgtcagccacaggagattttttttttttttcagcacaatgattctgtggaaggaaggacatgtctgaccagcaaacatgcaaatgagctttggacattcggctgctttctcccttgttcctcttccctcgttttttgtcacctctctcttttacttttctgtttgtttgtttattatctagtgcagtggttctcaaccttcctaatgctgctgcacctttttaatactacagttcctcatgttgtggtgacagcaacaacaatcaagttactttcgttgctacttcataatggtaattttgctactgttataaatcctaatataaatatctgtgttttccaatgttctgaaacaagcccttctgaaaggttcttttatccctccaaaaggggttgtgatacattgaaacgaactgatcaagtggtttcacatagtcagtaaaaggtctattcagatgccaaatactgtttgtcctcagttttcagccagaaatatgtctgttttagtactcccaatggcatgaccttgacagtgagttcaaattgcctgatctctgttacaaaagcaaatggtaagagactatagctcataattgattgtaaccctcttacaaccatatcaagttacgttttatgtatattacagagcaagctacaaaagactcagtgtggttcaaaatagcttgataaggaaatagtaaaatattctcagattgtcttgtcagggcataactttattttgtgtatgtgggttctgtgtgtgtgtctgtctgtcagtcagtctatgtctgtatgtatctgagtatttgtgtctatctgtctgtgtctgagtgtatgcatctctatctatgtctgtgtatgtctgtatctgtttgtatctgagtatgtgtgtttctgtctttgtgtgtgaatgggtgtgtatatatgtctatgtatgtgtgtgtcgtctgtctgtgtgtgtgtgtctgtgtgtctctgactctatctgactctgtctctgtctctatgtacatgcatgcgtgtgtgtgagtgggtgtgtctctgtgtgtgtgtctgtgtatgtagagcagacaacacacttgcatgtcatttttcaggggttgccacttttctttttaatttagggtctctcatgggcccaggaatctcctacaatactagactgaataggcaataggaccaggatcaacctttctctgcctccctggctctgagattacaagcatgtgtcaccatatccaaagttttttttgttttgttttgttttgttttgttttgtttgtttgtttgtttgttttgtttgttttttaaataagagttttgtggatttaactcagatcttcatggttgcaaggcaagcacttgactaggttatctacctcctctgccagacttcatgatggaaattccacagcagctggatatataaattagaatggagggtgtggaaactaaagaccaacagaaaccttttaaaaaggaaatgtatttaagcagctccacattcaagaccaacagaaaccttttaaaaaggaaatgtattcaagcagctccacattcaagacctgcctagtggtctatgtggggtgacagaagaggtgaacgtgtgtctagaaggctctgatatctagcaatgtatgtgaaatggcagcctgggcctgtcctccagcaaagcctgggagggcatcaggagggaatccagcgtggcgtaaataacacaagtgaagtttgaccttctcttctgaagaagcagagttgacatgtcatggccttcgtggtgtcaggtgggcttgtggttgagctacgcatactgtagttgtgagcccttggagatgggagtctgggggttacataggactctgaacatatgaaagaaaagctttgagcattcaccctggtgaagacagagcagaaaattacagccattacccgtaattcaattggtaatacaaggtgtccttacaaggactttaaataatttactaaattaaaaacttctgtaattatgaacagggtgcacagtgggaataaaaattaagatgaccctcaaggtcattggaagggtgactttaggaatccatattgattcaaccccctaacctcccaatgtggcctgtctctagattattgtctgctgtcttccatgccaatagcttgcttcaaatcaacttggagaacagaattagtcttctaattcagcgactccctgcaacatggctctctgatacgcctgctataaatgaagatatatagttacagaaccaagtattttcttctgtgaagactaagattttatcttccctcattacaaagtcacagcattcacaagtactcattacatgcatctgttaacaatgtctatgcaatctgtgttcttatttcatttttagaatccgcccgtacaatttatctcagtgtctgtggtaagattctcctctctggtcctcaatttctcagtgtaacatactcatgcaagctctggaaacaccctgttttgcagaagtgagcgatcctatcaccctatcaaagttgtaactttcttcaacatttataagaacagttctcagccttcttttacaatgcatttaaaactgcttgtttctagaacaaaactaactaaataaaattttctctatcaattgagaaaaagaaaagatagccatccaaatgaataaaaatagatgattttaaaaaatatattgtattctatgataccttatgcacgctcatgactattgatttggtgttttactggaatgttctcttaggggctaattgttgaacagaacacttttctcttgctgataccccacccccagtggttaattcctcagcatgaggagtcgtttgttcaccaggacatggccaaatagactccatactgtgtgaacagtctgtttggtggtctctgtatgcataaagcaagttcaggagagtgggaaaaaaatcagtgaagcagtcatttaaaccaaaacatccttagtaatctgaaattattgagaccattgaggaagccaaccacaaaaactataatttatgatgttaagagaggcctctgtgtaatgatgaattaatcatagtcacatgtgctcattggactagtctatgtaacaatagaaataccaggttttcattggcctatcctatgtaacaatagaaatgtcagattattgttttttgggttttttttttttgagtactctttgcagcaatggaaatgtcagaggaggttcactggaccattctttgtaacaatagaagtatcagatttttatttaactgtcttatgtagcaatggaaatgtcagtggaccttttgaagccataacactgtccacacttcaaggttactttaaaaaaatatttttttcattcttaggaaacaaatacctggatagcttagccacaccatggagcctgagatgtccgaggctgctagcaccccacacaatatcacaatttcttcccatgacagcttcttacaatccattcagaagaattttttttcctctttactttacaggttaccagccagtcttgtctggtcagcagggcttccaaggcatgatgggagtacagcagtcagcgcacagccagggtgtgatgagcagtcagcaaggagccccggtgcatggtgtgatggtctcctacccaaccatgtcttcttatcaggtgtgtgccagcagcagcagagtgtgggtgtgattgtgggtggggggctggccacaatctcactcttgtcaagacagaagttataggaagttgcaggtgtggagcagttagtagggtcatggatggttgatccatgcacccattacttcactttgaattgagacttagaattcaaacgtcagggctttttaatgcttttctggatttgcttccataaaaactgtttgtagaaggaaattctttgatgctctatcccagaagacctttgggaactctgttgaaatgatacttggtagaaaaccattgtggtgatttctctaccatattttatctactcaagtatacttctttctattggagttgcaaattatcacaggtttttatgtggtgtctcagatgcatttaaagcaaaccgatgcaggcacaattccattctgcaggtcagagcacatatcgagtctttaacacatcttgtgtgtgcttttgtaattaggaacctgaagcctccaagaataagaaatgaggaaggaggaaaatggtttggccgttcaatttagctgtactggatgcttctagctttaaagaacctatactcaagctttctatgtggacaaaactttccttcctactaaggaagccaccaagcttcttctcatgaaaacagaaagggcatgtttttccacactgagagatagctagaggggtgtccagatactctgttggggcaaaggaaggagccgaggagggaagggaggagagaaggcagggagactttatacttgtaagcatctgctttatcctagaatctctccctgccgtactttcagaggctctttgacagagatgtacttatccaaatggtccccatgtatgttcaacctgtggttcacaggctacatgcagcccatgattcctgtgaatgtagcacacatattcataagccatggtaccctgtaccggtgtcaagagttgtacagtcagacaggttaagtgactttctccaagcgaaatagctaataaatgatagatataggactagggatctgttcagtggatctcaaacacttgaatgatatttatgacatcatgtcctccctgaacacattaatcagcattctcacacttgtgtctcacacaggtgccaatgacccaaggctctcaagcagtgccccagcagacataccaaccaccaatcatgctgcccagtcaggcaggccaagggtcactcccagccaccggaatgcctgtgtactgtaacgtcacaccgccaaaccctcagaacaacctaaggttgatgggtccacactgcccctccagcacggttcctgtcatgtccgctagttgcagaacaaactgtgggaacgtgagcaacgcaggctggcaggtcaagttctgagagctcaggctgcctgctgtccacttcatcagatgttaactcatggccttcaaaggaagaggagactgacgactggctgaggacttccatatacactcaacgtgcaaacgattgctgctggtattctgtacaaactaatcaaagactaatacacacattagctggttaatggtgcataattccgtcatgtctgctaggtatgcctttctagcttagctagtgacatgaattcatcaaggtaagattttctcctaccactgaataccactgtgtagattacaatatccctgattcggattagttttgtacttcgtgttgagtttgtgatgctaaaagtatttaaaaatatatatataaactaaatcacacggtaccaaagctgtaatggaaaaaggaaagagttaaggaatggaaggaataatttatatacactatagagttttcttttttaaatggatatatatggtattgtagtgtttaatccaaataaaagcttatttgaccttacggaggaaggtcatgtttttaccaccagtttgtttccgtctctctttccatgtgctgtttacctatttagttaatggtttcattagcagatagatgttaattttaagaatgacatttccatacttgtacagaatacattttgaccacattaaaactcaatgtctcc

SEQ ID NO: 2441 - DNA, 3368 bp, Mus musculus
ccggcagcttgggacaggtggagctggagcaagctgggagcgagatttgctggaagctggttgtcgaccatgtgtcaagctgtgtaaggaaactgcctcgagatggacactctggactgctaatggggacatgggacggcagttacctctgatcacttgcgtggattctcccggagcagaacgacagaagccgccagtcattcgcccagatctacagctggaattctgtgctgaagggtctaaaaactctttttaatttggatctgggagaatgtctgagcaaggaggactgactccgaccatactggaagaagggcagacggagccagagtctgccccagaaaatggcatcctcaagtcagaaagtctggatgaggaggagaagctggaactgcagcggcgactggcggctcagaaccaagagaggagaaaatccaagtcaggagcaggcaaagggaagctgaccagaagtcttgctgtctgtgaagagtcttcagctagatctggaggggaaagtcaccaggatcaggaatcaattcacttacagctttccagtttccccagcctgcaagaggaggataaatctaggaaggatgattctgagagagaaaaagaaaaggataagaacagagagaaactctctgagagacccaagatcagaatgttatcaaaagattgcagccaagaatacacagattctacaggcatagacttacatgggtttctaattaacacgctgaagaacaattccagggacaggatgatactcttgaaaatggagcaggaaatgattgatttcattgctgacagcaataaccactataaaaagttcccccagatgtcatcctatcaaaggatgctggtccatcgggtggcagcgtactttggattggaccacaacgtggatcaaactggaaaatctgtcatcatcaacaagaccagcagcaccaggataccagagcaaaggttttgtgaacatttaaaagatgaaaaaagtgaagaatcccagaagcggtttatcttgaagcgagataactctagtattgataaagaagacaatcagcagaacagaatgcacccatttagagatgacagacgaagtaaatcaattgaagagagagaagaggaatatcagagagtgagggagagaatatttgcacatgattcagtttgctcacaggaaagcctatttttggacaacagtaggctccaggaagacatgcacatatgcaatgagacctataagaaaagacagctctttcgggctcaccgagacagctcaggaagaacttccgggagccggcagagcagctcagagactgagctcaggtggccagaccaccagcgggcttggagcagcacagattcggacagttccaaccgcaatctgaagcccaccatgaccaagacggcaagttttgggggcatcacggtgctgaccaggggcgacagcacgtccagtaccaggagtgctgggaaactgtccaaaacaggtaggtcttccagcagtgcgggctcctcaggatcactgtcccgcacccacccacagagcacggccctgacctctagcgtggcagctggttctcctggctgtatggcctattcagagaatggaatgggaggccaggttcctcccagcagcaccagctacatcctcctcccacttgaaagtgcgactggcatcccacccggaagcatccttcttaatccacacacaggtcagccctttgtgaacccggatggaacgcctgcgatatacaaccctcccggaagtcagcagacactgcgtggcactgttggtgggcagccccagcaacctccacagcagcaaccttcgcctcagcctcagcagcaggtccaggcatcacagccccagatggcagggccactggtcactcagagagaagaactggctgcccagttcagccagctgagcatgagccggcagtcctcgggagacactcctgaacctccctctggtacagtctacccagcctctctcctgccacaaacggctcagccacagagttatgtcatcacttctgcaggccagcagctctctacagggggcttctcggactctggcccgcccatctcccagcaggtcctgcaggccccgccctctccccagggatttgtacagcagcctccacctgcacagatgtccgtctattactacccatctggtcagtaccctacctcaacctcacagcagtaccgacccctcgcctcagtccagtacagtgctcagcggagtcagcaaataccacagaccacacagcaagcaggttaccagccagtcttgtctggtcagcagggcttccaaggcatgatgggagtacagcagtcagcgcacagccagggtgtgatgagcagtcagcaaggagccccggtgcatggtgtgatggtctcctacccaaccatgtcttcttatcaggtgccaatgacccaaggctctcaagcagtgccccagcagacataccaaccaccaatcatgctgcccagtcaggcaggccaagggtcactcccagccaccggaatgcctgtgtactgtaacgtcacaccgccaaaccctcagaacaacctaaggttgatgggtccacactgcccctccagcacggttcctgtcatgtccgctagttgcagaacaaactgtgggaacgtgagcaacgcaggctggcaggtcaagttctgagagctcaggctgcctgctgtccacttcatcagatgttaactcatggccttcaaaggaagaggagactgacgactggctgaggacttccatatacactcaacgtgcaaacgattgctgctggtattctgtacaaactaatcaaagactaatacacacattagctggttaatggtgcataattccgtcatgtctgctaggtatgcctttctagcttagctagtgacatgaattcatcaaggtaagattttctcctaccactgaataccactgtgtagattacaatatccctgattcggattagttttgtacttcgtgttgagtttgtgatgctaaaagtatttaaaaatatatatataaactaaatcacacggtaccaaagctgtaatggaaaaaggaaagagttaaggaatggaaggaataatttatatacactatagagttttcttttttaaatggatatatatggtattgtagtgtttaatccaaataaaagcttatttgaccttacggaggaaggtcatgtttttaccaccagtttgtttccgtctctctttccatgtgctgtttacctatttagttaatggtttcattagcagatagatgttaattttaagaatgacatttccatacttgtacagaatacattttgaccacattaaaactcaatgtctcc

SEQ ID NO: 2442 - protein, 801 aa, Mus musculus
MSEQGGLTPTIEGQTEPESAPENGILKSESLDEEEKLELQRRLAAQNQERRKSKSGAGKGKLTRSLAVCEESSARSGGESHQDQESIHLQLSSFPSLQEEDKSRKDDSEKEKDKNREKLSPKIRMLSKDCSQEYTDSTGIDLHGFLINTLKNNSRDRMILLKMEQEMIDFIADSNNHYKKFPQMSSYQRMLVHRVAAYFGLDHNVDQTGKSVIINKTSSTRIPEQRFCEHLKDEKSEESQKRFILKRDNSSIDKEDNQQNRMHPFRDDRRSKSIEEREEEYQRVRERIFAHDSVCSQESLFLDNSRLQEDMHICNETYKKRQLFRAHRDSSGRTSGSRQSSSETELRWPDHQRAWSSTDSDSSNRNLKPTMTKTASFGGITVLTRGDSTSSTRSAGKLSKTGRSSSSAGSSGSLSRTHPQSTALTSSVAAGSPGCMAYSENGMGGQVPPSSTSYILLPLESATGIPPGSILLNPHTGQPFVNPDGTPAIYNPPGSQQTLRGTVGGQPQQPPQQQPSPQPQQQVQASQPQMAGPLVTQREELAAQFSQLSMSRQSSGDTPEPPSGTVYPASLLPQTAQPQSYVITSAGQQLSTGGFSDSGPPISQQVLQAPPSPQGFVQQPPPAQMSVYYYPSGQYPTSTSQQYRPLASVQYSAQRSQQIPQTTQQAGYQPVLSGQQGFQGMMGVQQSAHSQGVMSSQQGAPVHGVMVSYPTMSSYQVPMTQGSQAVPQQTYQPPIMLPSQAGQGSLPATGMPVYCNVTPPNPQNNLRLMGPHCPSSTVPVMSASCRTNCGNVSNAGWQVKF

SEQ ID NO: 2443 - DNA, 3184 bp, Mus musculus
gcgttctagaagaggctgggcaagggacccgctggtgacctggttgtcgaccatgtgtcaagctgtgtaaggaaactgcctcgagatggacactctggactgctaatggggacatgggacggcagttacctctgatcacttgcgtggattctcccggagcagaacgacagaagccgccagtcattcgcccagatctacagctggaattctgtgctgaagggtctaaaaactctttttaatttggatctgggagaatgtctgagcaaggaggactgactccgaccatactggaagaagggcagacggagccagagtctgccccagaaaatggcatcctcaagtcagaaagtctggatgaggaggagaagctggaactgcagcggcgactggcggctcagaaccaagagaggagaaaatccaagtcaggagcaggcaaagggaagctgaccagaagtcttgctgtctgtgaagagtcttcagctagatctggaggggaaagtcaccaggatcaggaatcaattcacttacagctttccagtttccccagcctgcaagaggaggataaatctaggaaggatgattctgagagagaaaaagaaaaggataagaacagagagaaactctctgagagacccaagatcagaatgttatcaaaagattgcagccaagaatacacagattctacaggcatagacttacatgggtttctaattaacacgctgaagaacaattccagggacaggatgatactcttgaaaatggagcaggaaatgattgatttcattgctgacagcaataaccactataaaaagttcccccagatgtcatcctatcaaaggatgctggtccatcgggtggcagcgtactttggattggaccacaacgtggatcaaactggaaaatctgtcatcatcaacaagaccagcagcaccaggataccagagcaaaggttttgtgaacatttaaaagatgaaaaaagtgaagaatcccagaagcggtttatcttgaagcgagataactctagtattgataaagaagacaatcagaacagaatgcacccatttagagatgacagacgaagtaaatcaattgaagagagagaagaggaatatcagagagtgagggagagaatatttgcacatgattcagtttgctcacaggaaagcctatttttggacaacagtaggctccaggaagacatgcacatatgcaatgagacctataagaaaagacagctctttcgggctcaccgagacagctcaggaagaacttccgggagccggcagagcagctcagagactgagctcaggtggccagaccaccagcgggcttggagcagcacagattcggacagttccaaccgcaatctgaagcccaccatgaccaagacggcaagttttgggggcatcacggtgctgaccaggggcgacagcacgtccagtaccaggagtgctgggaaactgtccaaaacaggttctgagtcttccagcagtgcgggctcctcaggatcactgtcccgcacccacccacagagcacggccctgacctctagcgtggcagctggttctcctggctgtatggcctattcagagaatggaatgggaggccaggttcctcccagcagcaccagctacatcctcctcccacttgaaagtgcgactggcatcccacccggaagcatccttcttaatccacacacaggtcagccctttgtgaacccggatggaacgcctgcgatatacaaccctcccggaagtcagcagacactgcgtggcactgttggtgggcagccccagcaacctccacagcagcaaccttcgcctcagcctcagcagcaggtccaggcatcacagccccagatggcagggccactggtcactcagagagaagaactggctgcccagttcagccagctgagcatgagccggcagtcctcgggagacactcctgaacctccctctggtacagtctacccagcctctctcctgccacaaacggctcagccacagagttatgtcatcacttctgcaggccagcagctctctacagggggcttctcggactctggcccgcccatctcccagcaggtcctgcaggccccgccctctccccagggatttgtacagcagcctccacctgcacagatgtccgtctattactacccatctggtcagtaccctacctcaacctcacagcagtaccgacccctcgcctcagtccagtacagtgctcagcggagtcagcaaataccacagaccacacagcaagcaggttaccagccagtcttgtctggtcagcagggcttccaaggcatgatgggagtacagcagtcagcgcacagccagggtgtgatgagcagtcagcaaggagccccggtgcatggtgtgatggtctcctacccaaccatgtcttcttatcaggtgccaatgacccaaggctctcaagcagtgccccagcagacataccaaccaccaatcatgctgcccagtcaggcaggccaagggtcactcccagccaccggaatgcctgtgtactgtaacgtcacaccgccaaaccctcagaacaacctaaggttgatgggtccacactgcccctccagcacggttcctgtcatgtccgctagttgcagaacaaactgtgggaacgtgagcaacgcaggctggcaggtcaagttctgagagctcaggctgcctgctgtccacttcatcagatgttaactcatggccttcaaaggaagaggagactgacgactggctgaggacttccatatacactcaacgtgcaaacgattgctgctggtattctgtacaaactaatcaaagactaatacacacattagctggttaatggtgcataattccgtcatgtctgctaggtatgcctttctagcttagctagtgacatgaattcatcaaggtaagattttctcctaccactgaataccactgtgtagattacaatatccctgattcggattagttttgtacttcgtgttgagtttgtgatgctaaaagtatttaaaaatatatatataaactaaatcacacggtaccaaagctgtaatggaaaaaggaaagagttaaggaatggaaggaataatttatatacactatagagttttcttttttaaatggatatatatggtattgtagtgtttaatccaaataaaagcttatttgacctt

SEQ ID NO: 2444 - protein, 801 aa, Mus musculus
MSEQGGLTPTIEGQTEPESAPENGILKSESLDEEEKLELQRRLAAQNQERRKSKSGAGKGKLTRSLAVCEESSARSGGESHQDQESIHLQLSSFPSLQEEDKSRKDDSEKEKDKNREKLSPKIRMLSKDCSQEYTDSTGIDLHGFLINTLKNNSRDRMILLKMEQEMIDFIADSNNHYKKFPQMSSYQRMLVHRVAAYFGLDHNVDQTGKSVIINKTSSTRIPEQRFCEHLKDEKSEESQKRFILKRDNSSIDKEDNQNRMHPFRDDRRSKSIEEREEEYQRVRERIFAHDSVCSQESLFLDNSRLQEDMHICNETYKKRQLFRAHRDSSGRTSGSRQSSSETELRWPDHQRAWSSTDSDSSNRNLKPTMTKTASFGGITVLTRGDSTSSTRSAGKLSKTGSESSSSAGSSGSLSRTHPQSTALTSSVAAGSPGCMAYSENGMGGQVPPSSTSYILLPLESATGIPPGSILLNPHTGQPFVNPDGTPAIYNPPGSQQTLRGTVGGQPQQPPQQQPSPQPQQQVQASQPQMAGPLVTQREELAAQFSQLSMSRQSSGDTPEPPSGTVYPASLLPQTAQPQSYVITSAGQQLSTGGFSDSGPPISQQVLQAPPSPQGFVQQPPPAQMSVYYYPSGQYPTSTSQQYRPLASVQYSAQRSQQIPQTTQQAGYQPVLSGQQGFQGMMGVQQSAHSQGVMSSQQGAPVHGVMVSYPTMSSYQVPMTQGSQAVPQQTYQPPIMLPSQAGQGSLPATGMPVYCNVTPPNPQNNLRLMGPHCPSSTVPVMSASCRTNCGNVSNAGWQVKF

SEQ ID NO: 2445 - DNA, 2595 bp, Mus musculus
gtagcagagacgctgcgggctccaacgacagtcacctggttcccgcattgctggtgggaccacaggtcgcagaggggcggacagatcagcgcaaggactggctgcaggagaaggtggctactcccaagagagaggagcagagcaaagcctggacaccacccccaacccctttcctgaagcagacagactgacagacaggcaaatagacagacaggagctcagcagcctgtggtgacatacagactctctagcagcgaagacctccaagcgtccggagcggtgacagtccaacagccgcagccacgcgttccccaccagcgctgtgcctgggcagcgcgaggacccctgcctccaagccaagggctccttttgctagcagttaaaataaatcgaccaaacaacaaaggcaagccacaaaccaaactgacccaaccaaagcattcactgagaaacaataattactcacaaaagccccaaacgaaatccagtcagtcaaggcacccgggacgctgggtcactccactgttccttcaggttgtcgaccatgtgtcaagctgtgtaaggaaactgcctcgagatggacactctggactgctaatggggacatgggacggcagttacctctgatcacttgcgtggattctcccggagcagaacgacagaagccgccagtcattcgcccagatctacagctggaattctgtgctgaagggtctaaaaactctttttaatttggatctgggagaatgtctgagcaaggaggactgactccgaccatactggaagaagggcagacggagccagagtctgccccagaaaatggcatcctcaagtcagaaagtctggatgaggaggagaagctggaactgcagcggcgactggcggctcagaaccaagagaggagaaaatccaagtcaggagcaggcaaagggaagctgaccagaagtcttgctgtctgtgaagagtcttcagctagatctggaggggaaagtcaccaggatcaggaatcaattcacttacagctttccagtttccccagcctgcaagaggaggataaatctaggaaggatgattctgagagagaaaaagaaaaggataagaacagagagaaactctctgagagacccaagatcagaatgttatcaaaagattgcagccaagaatacacagattctacaggcatagacttacatgggtttctaattaacacgctgaagaacaattccagggacaggatgatactcttgaaaatggagcaggaaatgattgatttcattgctgacagcaataaccactataaaaagttcccccagatgtcatcctatcaaaggatgctggtccatcgggtggcagcgtactttggattggaccacaacgtggatcaaactggaaaatctgtcatcatcaacaagaccagcagcaccaggataccagagcaaaggttttgtgaacatttaaaagatgaaaaaagtgaagaatcccagaagcggtttatcttgaagcgagataactctagtattgataaagaagacaatcagcagaacagaatgcacccatttagagatgacagacgaagtaaatcaattgaagagagagaagaggaatatcagagagtgagggagagaatatttgcacatgatgtgagtagttgttttaattgcctcttgagtatggtccttccatcagcagaaaggcccctcgttgctcggacagagatctggcagggagtacagaggctgggagcaaggaacgagttacaaagcaggaaacacaaatgtttctgggagagaacctggttcagggatgcgttgaaacagtccaagagtctgtgtatgtgccccccagggcatcacctaccagggtagagagaggtggtgtggatcagtaaaggagacagcacagaaagggttatcaatttctgaaatttctttacatctaggtagcagatcacctataagtgactttttaaaaaatatatatatatatatgggtatgaggggccagggaaagggctccgtgagtgaagtgtttactgtacaaacatgaagagtttggtttgaatctctatcactcttgtaaaaggcaggatggggacaggcttctataacacaagcactaaagaggtagacacaggtggatcctaggagctcattgaccaaccagtccagcccatctgcaagcctctgcttcatagagactctgactacaaacagtaatggagagagcaacagaaagaggcacctgatgtgagtctctggtccccacacatgcacgcaggcatacacgtgtgtgtacaccactcacacgtgtgtacagatgcacacacatatgcacatgcacacagtgcaaacaaaatgcctttttgttaaaaaaccaacagaatccagaagaagtttaaagcactatgtgttagtgtacactctttctaacacaaaaacacacatacacatacatacatacacacacacacatattatttagcaaatattgacacttcactatgaaaatgctagttgatttcagggcaaatcaaatttatgaacaatttgccaagggaatattcactaaacaacttcttttttgttgttgttgttt

SEQ ID NO: 2446 - protein, 366 aa, Mus musculus
MSEQGGLTPTIEGQTEPESAPENGILKSESLDEEEKLELQRRLAAQNQERRKSKSGAGKGKLTRSLAVCEESSARSGGESHQDQESIHLQLSSFPSLQEEDKSRKDDSEKEKDKNREKLSPKIRMLSKDCSQEYTDSTGIDLHGFLINTLKNNSRDRMILLKMEQEMIDFIADSNNHYKKFPQMSSYQRMLVHRVAAYFGLDHNVDQTGKSVIINKTSSTRIPEQRFCEHLKDEKSEESQKRFILKRDNSSIDKEDNQQNRMHPFRDDRRSKSIEEREEEYQRVRERIFAHDVSSCFNCLLSMVLPSAERPLVARTEIWQGVQRLGARNELQSRKHKCFWERTWFRDALKQSKSLCMCPPGHHLPG

SEQ ID NO: 2447 - DNA, 3180 bp, Mus musculus
ggagtgggcatctcactctgcaatgaaaggagcccgagaacagacagagccctgtgctgctgtggagactgcagagcagaagggagtgggaaggttgtcgaccatgtgtcaagctgtgtaaggaaactgcctcgagatggacactctggactgctaatggggacatgggacggcagttacctctgatcacttgcgtggattctcccggagcagaacgacagaagccgccagtcattcgcccagatctacagctggaattctgtgctgaagggtctaaaaactctttttaatttggatctgggagaatgtctgagcaaggaggactgactccgaccatactggaagaagggcagacggagccagagtctgccccagaaaatggcatcctcaagtcagaaagtctggatgaggaggagaagctggaactgcagcggcgactggcggctcagaaccaagagaggagaaaatccaagtcaggagcaggcaaagggaagctgaccagaagtcttgctgtctgtgaagagtcttcagctagatctggaggggaaagtcaccaggatcaggaatcaattcacttacagctttccagtttccccagcctgcaagaggaggataaatctaggaaggatgattctgagagagaaaaagaaaaggataagaacagagagaaactctctgagagacccaagatcagaatgttatcaaaagattgcagccaagaatacacagattctacaggcatagacttacatgggtttctaattaacacgctgaagaacaattccagggacaggatgatactcttgaaaatggagcaggaaatgattgatttcattgctgacagcaataaccactataaaaagttcccccagatgtcatcctatcaaaggatgctggtccatcgggtggcagcgtactttggattggaccacaacgtggatcaaactggaaaatctgtcatcatcaacaagaccagcagcaccaggataccagagcaaaggttttgtgaacatttaaaagatgaaaaaagtgaagaatcccagaagcggtttatcttgaagcgagataactctagtattgataaagaagacaatcagtcagtttgctcacaggaaagcctatttttggacaacagggctcaccgagacagctcaggaagaacttccgggagccggcagagcagctcagagactgagctcaggtggccagaccaccagcgggcttggagcagcacagattcggacagttccaaccgcaatctgaagcccaccatgaccaagacggcaagttttgggggcatcacggtgctgaccaggggcgacagcacgtccagtaccaggagtgctgggaaactgtccaaaacaggttctgagtcttccagcagtgcgggctcctcaggatcactgtcccgcacccacccacagagcacggccctgacctctagcgtggcagctggttctcctggctgtatggcctattcagagaatggaatgggaggccaggttcctcccagcagcaccagctacatcctcctcccacttgaaagtgcgactggcatcccacccggaagcatccttcttaatccacacacaggtcagccctttgtgaacccggatggaacgcctgcgatatacaaccctcccggaagtcagcagacactgcgtggcactgttggtgggcagccccagcaacctccacagcagcaaccttcgcctcagcctcagcagcaggtccaggcatcacagccccagatggcagggccactggtcactcagtctgtccagagcctgcagccatcttcccagtctgtgcaatatccagcggtctcttttcctccccagcatctcctgcctatgtcgccaacgcagcacttccccttgagagaagaactggctgcccagttcagccagctgagcatgagccggcagtcctcgggagacactcctgaacctccctctggtacagtctacccagcctctctcctgccacaaacggctcagccacagagttatgtcatcacttctgcaggccagcagctctctacagggggcttctcggactctggcccgcccatctcccagcaggtcctgcaggccccgccctctccccagggatttgtacagcagcctccacctgcacagatgtccgtctattactacccatctggtcagtaccctacctcaacctcacagcagtaccgacccctcgcctcagtccagtacagtgctcagcggagtcagcaaataccacagaccacacagcaagcaggttaccagccagtcttgtctggtcagcagggcttccaaggcatgatgggagtacagcagtcagcgcacagccagggtgtgatgagcagtcagcaaggagccccggtgcatggtgtgatggtctcctacccaaccatgtcttcttatcaggtgccaatgacccaaggctctcaagcagtgccccagcagacataccaaccaccaatcatgctgcccagtcaggcaggccaagggtcactcccagccaccggaatgcctgtgtactgtaacgtcacaccgccaaaccctcagaacaacctaaggttgatgggtccacactgcccctccagcacggttcctgtcatgtccgctagttgcagaacaaactgtgggaacgtgagcaacgcaggctggcaggtcaagttctgagagctcaggctgcctgctgtccacttcatcagatgttaactcatggccttcaaaggaagaggagactgacgactggctgaggacttccatatacactcaacgtgcaaacgattgctgctggtattctgtacaaactaatcaaagactaatacacacattagctggttaatggtgcataattccgtcatgtctgctaggtatgcctttctagcttagctagtgacatgaattcatcaaggtaagattttctcctaccactgaataccactgtgtagattacaatatccctgattcggattagttttgtacttcgtgttgagtttgtgatgctaaaagtatttaaaaatatatatataaactaaatcacacggtaccaaagctgtaatggaaaaaggaaagagttaaggaatggaaggaataatttatatacactatagagttttcttttttaaatggatatatatggtattgtagtgtttaatccaaataaaagcttatttgacct

SEQ ID NO: 2448 - protein, 783 aa, Mus musculus
MSEQGGLTPTIEGQTEPESAPENGILKSESLDEEEKLELQRRLAAQNQERRKSKSGAGKGKLTRSLAVCEESSARSGGESHQDQESIHLQLSSFPSLQEEDKSRKDDSEKEKDKNREKLSPKIRMLSKDCSQEYTDSTGIDLHGFLINTLKNNSRDRMILLKMEQEMIDFIADSNNHYKKFPQMSSYQRMLVHRVAAYFGLDHNVDQTGKSVIINKTSSTRIPEQRFCEHLKDEKSEESQKRFILKRDNSSIDKEDNQSVCSQESLFLDNRAHRDSSGRTSGSRQSSSETELRWPDHQRAWSSTDSDSSNRNLKPTMTKTASFGGITVLTRGDSTSSTRSAGKLSKTGSESSSSAGSSGSLSRTHPQSTALTSSVAAGSPGCMAYSENGMGGQVPPSSTSYILLPLESATGIPPGSILLNPHTGQPFVNPDGTPAIYNPPGSQQTLRGTVGGQPQQPPQQQPSPQPQQQVQASQPQMAGPLVTQSVQSLQPSSQSVQYPAVSFPPQHLLPMSPTQHFPLREELAAQFSQLSMSRQSSGDTPEPPSGTVYPASLLPQTAQPQSYVITSAGQQLSTGGFSDSGPPISQQVLQAPPSPQGFVQQPPPAQMSVYYYPSGQYPTSTSQQYRPLASVQYSAQRSQQIPQTTQQAGYQPVLSGQQGFQGMMGVQQSAHSQGVMSSQQGAPVHGVMVSYPTMSSYQVPMTQGSQAVPQQTYQPPIMLPSQAGQGSLPATGMPVYCNVTPPNPQNNLRLMGPHCPSSTVPVMSASCRTNCGNVSNAGWQVKF

SEQ ID NO: 2449 - DNA, 1688 bp, Mus musculus
ccagcagggccccctctgccatccacagcagatgcttcatgacggagtaaagagtgcgttctagaagaggctgggcaagggacccgctggtgacctggttgtcgaccatgtgtcaagctgtgtaaggaaactgcctcgagatggacactctggactgctaatggggacatgggacggcagttacctctgatcacttgcgtggattctcccggagcagaacgacagaagccgccagtcattcgcccagatctacagctggaattctgtgctgaagggtctaaaaactctttttaatttggatctgggagaatgtctgagcaaggaggactgactccgaccatactggaagaagggcagacggagccagagtctgccccagaaaatggcatcctcaagtcagaaagtctggatgaggaggagaagctggaactgcagcggcgactggcggctcagaaccaagagaggagaaaatccaagtcaggagcaggcaaagggaagctgaccagaagtcttgctgtctgtgaagagtcttcagctagatctggaggggaaagtcaccaggatcaggaatcaattcacttacagctttccagtttccccagcctgcaagaggaggataaatctaggaaggatgattctgagagagaaaaagaaaaggataagaacagagagaaactctctgagagacccaagatcagaatgttatcaaaagattgcagccaagaatacacagattctacaggcatagacttacatgggtttctaattaacacgctgaagaacaattccagggacaggatgatactcttgaaaatggagcaggaaatgattgatttcattgctgacagcaataaccactataaaaagttcccccagatgtcatcctatcaaaggatgctggtccatcgggtggcagcgtactttggattggaccacaacgtggatcaaactggaaaatctgtcatcatcaacaagaccagcagcaccaggatagtccaagatactggctggagatgcaagcatgctcaccgtacaggagcagtgtgcaccaactaggagcagtgggcagctgtatgtgctagagatttttttacctggagatgaggaaacttttacccatctaaaacaagcattgattttatttcctacatgttttggtactgacatatagaaagctaaacgtgatacctcatgaaacaaattctaaaaatataaagataaaaataaacatgacaaattaggttggtatgacacatgcccatgaggtacacagtgaagaccacttatcaacatttaataaacacatggctctttgtagccttgaaaactgttggtgaaattcatttctgggttcatggattaaaagtaattaattaccatttgaagtactattcctaaatgaattacttcggtgtcattcaccgtatggctcagaaataatactagtttggtgttcagtcagttgtaaaagtgatttttaatagctgggatacaatggctctttgtctgtagttttagttctccataaagccatcctggggaggaagaatcttattacaattgcttgattctttttaaacaaacctcaaagttactttatgagcattcaaaatatttttcaagaaacctaaaagaactgattttcttcttatttttgaaaatacaataaaagaatatacttgcaaatc

SEQ ID NO: 2450 - protein, 242 aa, Mus musculus
MSEQGGLTPTIEGQTEPESAPENGILKSESLDEEEKLELQRRLAAQNQERRKSKSGAGKGKLTRSLAVCEESSARSGGESHQDQESIHLQLSSFPSLQEEDKSRKDDSEKEKDKNREKLSPKIRMLSKDCSQEYTDSTGIDLHGFLINTLKNNSRDRMILLKMEQEMIDFIADSNNHYKKFPQMSSYQRMLVHRVAAYFGLDHNVDQTGKSVIINKTSSTRIVQDTGWRCKHAHRTGAVCTN

SEQ ID NO: 2451 - DNA, 1945 bp, Mus musculus
ggaggtgtacggtgaggttgctagaaatggtccccctaagaacgtgttgcagatggagaccatcatttcgctctctgccttctcaaaggatgcagcttctgcaagctagaatgacagtctctagaatggaaatgaatctgtatttttttttcaaattttgctccaatgcagaataaatctaaactgtgcccaccctttcctcatctgccttggaacccaactctgcagtttactgctttaagtaagcagcaaagtagacagggcaggcagggaggcacttcttgtttcctttttttttttttttttgtaattctgtgaaaatcagagagcctttgatatgctcttcagcctgagtagaccctctctttcaggattatgttactatagggcttgatgtctgagtggcattttagctaatgtcattttcatgaaagacagtcatttggaaggcactagggctagttatgcttccttcaaatagcagagtgatcttaacatgagagaccctgtcttcggggttatgtagcccttcaaggttgtcgaccatgtgtcaagctgtgtaaggaaactgcctcgagatggacactctggactgctaatggggacatgggacggcagttacctctgatcacttgcgtggattctcccggagcagaacgacagaagccgccagtcattcgcccagatctacagctggaattctgtgctgaagggtctaaaaactctttttaatttggatctgggagaatgtctgagcaaggaggactgactccgaccatactggaagaagggcagacggagccagagtctgccccagaaaatggcatcctcaagtcagaaagtctggatgaggaggagaagctggaactgcagcggcgactggcggctcagaaccaagagaggagaaaatccaagtcaggagcaggcaaagggaagctgaccagaagtcttgctgtctgtgaagagtcttcagctagatctggaggggaaagtcaccaggatcaggaatcaattcacttacagctttccagtttccccagcctgcaagaggaggataaatctaggaaggatgattctgagagagaaaaagaaaaggataagaacagagagaaactctctgagagacccaagatcagaatgttatcaaaagattgcagccaagaatacacagattctacaggcatagacttacatgggtttctaattaacacgctgaagaacaattccagggacaggatgatactcttgaaaatggagcaggaaatgattgatttcattgctgacagcaataaccactataaaaagttcccccagatgtcatcctatcaaaggatgctggtccatcgggtggcagcgtactttggattggaccacaacgtggatcaaactggaaaatctgtcatcatcaacaagaccagcagcaccaggatgtaagtcccaacgtagtgtctgtttggtgttttgtttttctgtcagagactggtttataagagcacactattcattgtaaagtatgcgacgttaaatatgtatagcgctggttatctttctggcctaatagcagtgggatgtcaggaatccatataataccaaatgagatctagggaatttggtgggagaacttcacttcaaaatagcattcagattaaaaacaacaggcattgattggtctgggagtgtagctcagtggtagagaacatggatggcacacacaaagtttattagattcccagtgcaacaaatgggtaaagcctacgcaagcaagcaagcaagcaagcaagcaggcaggcaggcaggcaggcaggcaggcaagctctttctgcagagacaggcatgatagcatatccctgtgctcccagtactctggacactcaggcaggaggatcaggagttgaaaaatagtcctatatacatgctatgattctgtcaaaaagacggggagggg

SEQ ID NO: 2452 - protein, 222 aa, Mus musculus
MSEQGGLTPTIEGQTEPESAPENGILKSESLDEEEKLELQRRLAAQNQERRKSKSGAGKGKLTRSLAVCEESSARSGGESHQDQESIHLQLSSFPSLQEEDKSRKDDSEKEKDKNREKLSPKIRMLSKDCSQEYTDSTGIDLHGFLINTLKNNSRDRMILLKMEQEMIDFIADSNNHYKKFPQMSSYQRMLVHRVAAYFGLDHNVDQTGKSVIINKTSSTRM

SEQ ID NO: 2453 - DNA, 175530 bp, Homo sapiens
atatggtatataacatataaaatatggtatataacatatgttatatatttgtaatatgctatatatgtacacttgccagtccatgttttaagaagctagcacaactgaaaaaaagtggagctagatataataccacatagctgtcaaagaaatctagaaacttttcatatgatatatataaaacatatctataatatatattatgccatgtatatattatatatattataccatgtatatatgtaatatattatatcatgtaatatgttagatggttacatatatgggtaaaaatacacacatacacacaatatatatgaaattcttgcctttagcctggttaatataaaccaaccaaggaaatattgcttgccaatgacaggttatgtagaaagtaatatggtaatatgttttattgtgtaaatctaggttatagtgttatagatattttggagaaagggtgaagttcttgcttcttcctgctaaaaactttaggctgggcatggtggcttacacctataatctcagcactctgggaggccaaggcaggatcatttgaaacccagagttcaagaccagcctagacaacatagtgaaaccatttacctacaaaaacattttaaaaattatccaggcatggtggtgtgcacctgtggtccctgctactcagtaggctgaggtggaaggatcccttgagctcaggagatcatggctgctatgagccatgaaaaaaaaaaaaaaaaaaaagacttcaaaaaactacttacttcattttaccatgccatactaaatacactgtgaagtctcttcctcctggtctaaatctatacaaatgacaaaactgcccagggaaattagaagctgttttatcagtgcattagtaattatagaaaggaaaacatatattgaagaggaaattacattgaggaagtaatccaagtcctttgctttaaaaatagcacttcaaaggagtttctgtcccagaagtagtagctttctaaaaaacagagggagttcagtgcaattgaaaagatagcaatttgcaagaccacaattgttatccatagtttgatactaacacattcattcattcactcctatttttgtcaggcagcatgagaaaataaataaaaaggtacatgactatagcagcagcagtagttttttcatttgttttttatgtatgaaagaataaaatatacagtgtaggaatgatctgagtatgtggatgacaagtacagtttttcccaataaatatgaagttaaaaagttactataagaataactaaaaaactggaatatgtcagaaatcatgattgaaactgaaatgcatctttaattctatgttttaaaaagctgccaaacttagactttcaagatccagataattctcctttttatttacacttttctggaagatagagaatcttggagagttagcacaaaattattttattgagttctccgatacctgaaatagataaggacaacccaagatggaaaggtatagaccaatctaaattaggaacatgtaataaatcactggaaaacaaaacaaaaaattctaaatatatagtcattgaagtaacattaaaaaccaattgatagtttaagaatactaaacatactgaaaactgacaaagctagatatgaggaaatcatatagaaatccatgcagagagataaggaaatggtgtgaaggaaaacccatagctcatatctaatatgtgtcacaaaaaagaattttaaaaagacaataatcatatggggaaattatttagaaataaaaaaagtaagactcttcagatgaaacaaaaaagtacatgaagtccctagtaagataaatgaaaacaaatctataaacctaacctaaacccaactctgagattatctatatctatatctatatctatatctatatctatctatctatctatctatctatctatctatctatctatctatctatctatctatctgtctacacacacacatatatttttgttgttgttgttgttgttgttgttgttgtccaggtgggagtgcagtggtgtgatctcggctcactgcaacctccaccttcggggttcaaacaatcctcctgcctcagcctcccaagtagcaggcatgtgccaccatgtccagctaatttttgtatttttattagagatggggtttcaccatgttggccaggctggtcctgaactcctgacctcaggtgatccgcctgctttggcctcccaaaatgctgggattacaggtgtgagccatcgtgcctgtcctgagattatattattttaaaagacatccagctgtatgattttaagtaaagcatgattagagtacggaaaatactcatgtacaatacagaaaatttgaaggactgtaatatatattagcacctgctagccaaaataaacttctagagtggatattagggctcccaacccccaggcctcagacccatatggatccctggcctgttaagaacagggctgcacagcaggaggtgagcagcctgcagcagcattgctccctgagctcctcctcctgtcagatcagcagagacattagagtctcataggagcactaactctattgtgaattacacatgtgagggatctaggttgcgtcctctttatgagaatctaatgcctgatgatctgaggtgaaacagtctcatcctgaaaccatgtccctatcccctgtggaaaaattgtcttccacgtaactggtcaccggtgccaaaaaagttggggactattgggggacaacttttgaatagcaggcaaaatagaatataaagtaaaagcattgatagagataaaagacattgaaataaacaatgatctatcaagacatattatttataactttgtccctgtttaacaaaacataaagaaatacagaaaatgaaaattgaaatgattgtaagaaaaaattcaaaattccacagttctctcagagacagatagatcaaaacagatagaattgataggataataaataaatgatacattattatatttaatattttatactaataaaatgaaaatattttaaataatataaacagtttaattttatatatctgaacatatagatttatatagaattttgtactaaataaagaacatgcattgttttcaagaacacgcagactatgaacagaaattgtttatatccagatgctacctgatttctcaacaaatcgaaattgttgactacaattaaattaatttaaacctaataataaatagtgagcactccctcaaaaagacctttataaactaaaagtaaaaaattatagtaaatcatccatgggataaaaatgagaattacaatgttgaacaaaataatgagaaaactccaatggtaaaacttttgttaggcagctaaaatgtacaaagatgaaaaaatatatacttaagtgggtataataggaaataagaaataatacaatttaatgagctaagctttcttcttcaagctgggtatggtggcacaaacttgtagtctcggctactagggaggctgaggtggaagcatcacttgagcccaggagagcctggacaacatagcaaaaacctcatatcttctctaaagagagaaagacagagagagagagagagagagagaggctataaaataataataatgaaacaaaccctaaaatattagaaagatttaaaagataaaattataaagagtaataaaatagagaatgtagatgttttaatctgttttttggaagaaagaataaaaatccgattatattgataaacatagtcaagagatggcacaatttaaaaattctaagaaactaataaggttatcatgagaagtaacatgaatatatagcaaaagacactaaaaaaacctgaaaaaaaggagaaattaatcaattgatctttgggaagacaatagcaaaagatttcagttctccccgaatcgaactataaagtcagtgcaataactatgaaaatatcaatgagatattttataaaatgttttaagctatttctagaaatcaaataaaagacaaaaagtaaaataaaaaatacagtcaaaataatactgaaagaagaagaagaatggggtcttgcctggaagacatgaagctttattataaattgtcagtaattagaatatcgtggcattggttagatgaaaactaattcttatcacctaattttagaaacttagaaatataaatagctgaggcaaaggtagaaatgacttaaatctcatagctatggtggcagattcaggaccaaaattcttgtctcctcaatcccaggcctggactctgtttcctacagtacatgctactctctcacatgctgttagacaagtagagagtttataaattagaacagtctgggtcggctatagtaataagcaattccaaatctttgtagcttaaaacacaatatttttttcttgcttaattacatatctgactgggtcagtgttgaagtcagctccacatagtcacttagcaacttaggctgatggagtctctatcatcttacagctgaactgtctgaacctcttctgtcatttgaccttttctgtcactgtgtgagggtcaagaagaacctacaggactccacagggcttttcattgccttagtccaaaagtattatatgtcagttccattcacatttcactggcaacaacttgtcacatgcccctgcctgattccaggatggctggggagtgtattgagctgtatgtgcaggcgggtaagaacaggtagatactggtgggctctagattacaattacatgtagtaaagtgaaagtaagtctgcattgttcagctgatgattcatataaaattctttctctcccattgaggtttctagttttttaatgtattcctgaatatctgtatccttatcctaggatttggagaataaacatatgacaatgtaaatcaaataagtgcttttgactctgtggttcaactgtttaaaatgataagcaaagaaggaggatgaaaaccatggttcggaggtttgcccatggttcccagggatctgctttatttatagaagggaaaaaggctggtccttagttcaccgaattctaacttcttggcctgaaaatgttccctcagcttcccccaatatttaccctttttacagaaactagagcctgtttcagggaaaagtctgaagagaaaagataattagtaaactcatagaattttaagaattcttttttcataagaaaagtttttgcctgaatttagtacaattcattcaaaatatacatagaaaaaaaattttttaaacatttctactgatatatttatttttaaatctatacaatttataccaagaagtcaaaggtcagtcaactctttgataaagattagtaatcaaaacaaaagcgattctgaaactgatacagcatcttcaaatctgctgtggtgccaaaatgtaaaatatagatactctgagaatgaggaattcaaattttaaagatttgccataaagagaaaaatttcccaacttggaaaccatgcccatcaatagccttgatttatgtataacatacacatgttctgtatttaatagacaactatgctgttataaatgcatttatatagtcaatgtcatgggaaaaaccccatcagttattctaaagtagagagcagattataaaataggaaagcagattataaagtaatatgcattctgtaatccatatatgaaaactatagctatatttttatggttatatatgcagagagattagctaagcacaaaaatgatggcagtttgggtggtggtatactgggagactttaattttgttccttttttattttgtccactcacttttttattttttttttacaaatctctatacaatttgctaatgtacatttattttgaaaagacaaaaaacttaaagagtagctttggaaaacaagttgtgcatttatgcagaattatatatccgtatattgtttttctgcagttgctgggtgttgaactacaattgggtttccaggaaagacctaagttctcttttggaatattaacactatgaatatgttttacctcttaactacacacacacacacacacacacacacacacacacacacaccattttaaggtatgaagaacagtttaaaaatgtcctgtacctcattagaggtggattgaagctgttttattctagtggctaattgatagaccttttaatatcatctcagggtcaagaagccaaatatattattccaagttctgaatagcttggtaacctttgtctttctttgtgtgaaaaagagaactgtgtccatcgtagaagaaagtgtgatctctggaacagcaatgcaagcgaggcaggatcatagacagtggtttggcaaatgttaggttatgctctgtgtcatcacttcttgtgtttcagagggataacatttacctctgttttccccacatatgcttctaatgctcctgctttcagttctaggctaggttttgaaaaattaaaaacatcttttgtgggttccataggagactgcaaacgctttgtgttgaagcaggtcctggagggggtgataacataggctgggtagagagggcctgctgctgggcatcctgcctccagccctgttctgcatcagaaaaagtccttgcatctgtgctctgctggctgcctggcctgcctcagccacaccaaagccacggatccctctgggcagagagggcagaggaagaaacacagtgctctgtgggccaggaggagaaaacccccaaatattaaggatgtgtctgaaaaaatggtatatctatcctaagagatgctgaaaagaaatacgaaatttagtcagcaacctttcttgtctcctgatgctcagatcttttagtgacaggtttcctaaccttctctttagctgtttctcctatttattctttttgtccttcctctgattcatgcttctccatgaaagtaccacacacattcatttttgaggaaatttcttggtttgcattttcagcaaagcatctttgtgcatgtgcaggccagtgttcatttgtggcctgcctgtgagaactccaagggttcatggagataattttctcatcctatacacagcctactacagaagagacatggctgtcatcaagggatctgtgccatcagaacatttggtttctagtctcccaaatcctctttgtttttgatcgtgacatttcttcatgctcagatgcatacatgatgtaacattctttgttgatgttctgaaatgtgttttagagttattttggcttcacacaaaataagaatggggctcaaaactttctggttgaaaagctaatctttggggctttttcttttctttttctcctgctttttggtactatgcatatttgtaaagctttacacccaagaatggtatgtaatggaccctagactgttttgttggaaacagggcaaataagaagtctctctaggggatttgtgggcctttattgtggtgtgggagtatgccctaaaggggagctcctcacagcctaattgttgacgagtgatgaaagttcaacagcacggcaactctacttctcgctccagctaaaaagtgcttataaaggtagctgggctattttagcaatttgccttattttgaaaatccaatttggtagcttcattaaagggcactaatttagtgtcttaggggaatatatgtttaaaggagcttgtcaacaatcttagatgtttgccagtgtataggtgagctcatttccccaagctggggttacccggttacatgcatgctccttgatttcaaacataatacaaaatagattcaaaagtcctcaaaccaaaagagtaacagtaccactccctctttcccaagtaccgcctcccattcctcagcgtagggtgctcttggtgcataaacacatctgcaattgacatagtcaatctgtcacctagaggtctaatacggaggacaaaggttttatttagtttagtgatagttaatatatgacaatctaagggccttaaagcatgataactgttttaaatagtttaaaaaaatagaaaaactttctgaacacctagaagaatcactcattgctcactgcatgcctgatactcccaatggtatatttcagtcccacattgggacaaaaattttaaagttgagtagctgaatgctaattatctacatagcctcaaataaacttgagccttctacagttcccactatgttgacaaaatattatgagaaaagatagaaaatttagttgaagcaaattattcttctttgggatgctttctttgaaaaataaagcttaaaatccatgagataatacaataaatattgtcatcaagtttgacaatacgcagttaagctatgaaatcactgtttcgttctttcacataggcactggagtatgtactaagaatactgagttctccctaggtataatttctcatccagtttatagaactgggttccatttaaaaaaaataaactatctgagtgaattctgattttttttttgtagagactttgtgttatgatcaatctgctaaggtttcctgttaatagattacctgtccaaccattcaggagatgccgagatgtagttctgtccagaagagaaatcaaatacgccaactttcttcctatgcagtctcaatttccctcaaagaaaaataggtttttcagaatgacttgagatgaagggaagggtagtaaattagaaatgctttcataattttcctttaaattttatatgtttggaaggaaggagaaaatacttgtaaaaaagcacttctggagatgactacgtggaaatgatcaggatgtagatcaaagtaacagttttgaattatttgggtttggtttgcctgaaacctcatacagcagattcattcttattctagtgagagctgaacaccaagggagacaatttcgaatagttggaaaataattacctactcatcaagggtcggtacaacctcattccatttttacagtagtttctagaagtacatgtatcatttatttgagatttataatcaatatcttagcgtatatgaacacagccatagctgtagaaatcacatttctataataatgcaaaggcatttatgttaataaatctgtttgtaatctctgtcattatggttgggtgtcaataagtgaaactaaaaggatgtggaaaatttcataacatgttttatgctagttatttgtttgttgtctattcatggggttactaattacaactggtaaaagttgattttctcctcttcagtttattgtgggatggggcgttcatttcgccagatacacagttattcagtgtctacatttcagaagctgaattgctggatatagtcaaaatgagctttggcaattccatgtgtgagtgtacaactataattttgctgcacattaataacaaccttgcaaagaagcccagaatcaaatgccttgctctcagctgggagcagaaagctagagtggtatatcttggctggtgacctataatgttggaaaagtaggctctacattcactcagaaggagtaggtggaattccggaaatttattcactctccttcactacgccttttcctttttttttttttttccttccttgtagtgtgttagtgagtgctccgagacaatgaaaaaaacaatgaattacagacaataaaaatagtgcatctctagaacaagcggtaaaatcaaggcttttatttcttcaggtgtcaactctgttccttccccaggtcctaccctgcccaggtttctgtggcacctctgtgattccaaatcagcgatcaggtgggcagcggtctgggcagtcacccacagggagtacacttggtgctgcacgttcggactttcagtcttgctcaaagcaaagaatctccaagagcgctgaggctacggattcattcgggtggggcgaggtgttattattgtgggattgtctctgcagagttggcctggagagtgagcggtggagggagtggaacaaggcttcgtcaagagtccccaggagtccaggggcgcccccgagacgggtacgctggagggcctgggcacgggggacaagagagaatacatgcctgctcgctgggagcagggaggcggtgtggcggggcagggggcaacgtgccagttttctttctgattaatgatgctcacgctgctgcgcgtggctcatgcgctttgtctccagccttagggctggcggagaacggcccagggaatgagtggtaccgcgggcgcccggcgcacccagcaggtgccatcactctggatgggccagttctggatgctcccagtggcgcagaggcggcgacactggcaggcgtccggctgccgccacctcccgggtgtggcgggtctggggcccggggtctccggccagagcagctgtggagccacgtgcaacacgcgcgttgccctcagcccgggcggggaccggacgcatccggagctgcggggaggagccgggcgccgcccccggcggcagtgccagccgcgtgggagggcacggaccggcggaggggcagacgacggaggcggccaagcgggaggaacgggaccgagggatcgaccaaggctggctggctaggggtgggactggcagagctacggacaggtgggagcagtcagacagcctgagagagggagaccagaacgcaaagagagcgagagcattaagtaggcagggagaggcacacagaaagatagacagcaacactcgcgtgctccctccctccacacgccctcctcttaccgagcgaagcggccaggggcacagagtgggagaggactgtgggcacagaagaccggaagagggacgctgcattgctggtgggacggagggattcggacggacggacagaccagcgcacagactggcagcctgcgagagtggcagctttgagagcagagcgcagcaaagcgagaatcccgcgccgagctgctagtcggacccacagacggtcggactgacagacgtgcagacggacagaagagcagacaggaggcgggggcgcgttcactcccggcggccagccggccagagaaggcggcggtggcaccttctgagcgcgtccggagcagagaccagcagcagcaggggcagcggggacacaagccgcgaccgagccgccgccgcagccctggctgccacagctgtgtgggatcccagccgacactgcagaaagctccttttactagcagttaaataaatcgaccaaaaacaaaacaaacaaacaaacccaacaacaacaacaacaacaaaagccaagccaaaagccaaaacaaacaaatccagccaaatcaatcattgagaaacaataatattaataaaatccaaaactaaatcaaaccaatcaaggcaccaagacgcaggggggatatccacagttcgatcaaggtaataatcaaggtcttccgacgtgaacattgcacgccttttgtggatttttagaattccttctttctttctgccatatatctgtctgtttcttttgaattttttcttgtctgtatttcttcttcgtgtttgtagaaagctgatgttgttatacatgtattgtgttttttatgtttcgtcaaggagggatggacgctccttcccccagaaaagacagaaatggaaagctggaagttggcaatgattttcatcagagaagtctacagtgatttgtataggctttatggtagaaagtttgcaatgctctttttgaaagagacctattgaagaggtagaaagttatactctgtttgttgtcctggaaggattggggtcctaggtcccaaagggctcaaggggaagaatagaaaagatgttcagttttatttttacatgcatgaaatctgtgcttcattgcaatcgccaatttactcttttctgtctcaggttgtagatatggtggtagaattgagttgaattaggcaggtgtttagaaagtttcttaggaataggaattaactcattcaatgtttatgcatagaaatatagctgaggtggatgtggttgctgtcagctattcaggtttgctacctgatcacctcctgaagatgtagggtaaggacagaatccaagcctaaaagaaaaaacaaggagagaattgaaagttataggggtgggcagttatatttcttaaaaggctggtagaaatcattttcctaagaatgtgtttagagtacagatattcattttaatctttgatttctttaagttttttgatgtttgattttctaccagtatgacactcagcctctcaaaacaagaaggacattccccaaagttgaaatgaatctgtataagatttcattcaaatgcagaataaattcaaatgattcctaacccctcctcatctactttggagataaaaactgctatgattgttttaagtaaacagagaagtggagatgacaggaaatcatttttcatttgttaaaaatcagaaaacctttgacacacttttagataaatacacctactcctttgatcctttgtgtatgtattaccacagggcttaaatatcttaataagattttagttaatgtcattttcatgaaagacagtcatttggaagccaagagctctatctatgttttgttcaaatagccgagtaatctactatcttggcagtaattacttctgctgcatttctaatgtgaattgcatgtgagagcttatgaatacactcttttcaagtgtatgtgggttttcaaggtatgtatttgtgtttgatcctatatttcctttgttataacattctgcttttcatcactttgacagaatatttgtaaattttctggagagtgagtttgggtatatgctttgaggaatatgcttcctcattacaaaagatatggaaacataattgattactacacttgcttatcaatagtattttgattttgtttaaatgaaatgtttaagatacgtggattgctatgcattcatgttttagatttatcctctccaggcatgatttatgccattcaataattaaaataactaagttactttagaaaaagtgcctattaaacagagtactttgtttagaggacgtatatttaaataaacttatacagctaaagaaactgactttcacttcctcagtgacttaatttcactacatgctgatttgtcctttgcagtatttagctcagaccaagacagaattgtatgtgctattagatttgcaaattgctgatctcccagtgactttccctcttagatcccagttgagtatggttaccttgagaactgtggtattagccatgttagagcatgctccactggggagttctgtgcagtctatttttaatgctatttaatgaaggagcgagcgcctcactcagcaataaaagaagcatgagggaagacagagcagtgcatggttatggatactggacaaggatatttggaaaggtaaaggctgaccattggatatggtaattttaatgaagtcctaatatatcatatgaatggaaatatggatttttgttagagaattatacatgaatagttcaataggtgttttcgtaaacctcttcactagttcttagaaagaagactcaataatttgagtttttaaaacttgagggacatactaaccagggagttcctgcatgcagactatttttaatacaagctgtcatattcttgggtggtgagaagtacagaaataatttcaaattcctaaaatattgttcggtgaaaggtttggagcttgtaaaacgttctgcgaataaaataactaatatgcttctaagatactacaataacctgaagctctgccttgtgaattgcttcattttcttttatgaacttggagtctaggtccagaattgtcacaactaagagaagcaggaagttttgtttggacttgatagaatatttggggtgttttctctccttagaattaagataagccctacagattatcttactgaagtctaaatattttaaaaatataagtagcagaggcagcactggtaacttttgtaatgtcacaataaagggcaaaatatcttaacattatagtgtgtacaatgcaagaagccatctgtctgcaacatttgtatatatgcagaacacctgtcttgaggtagaaagtgagaatgttcaatcagaaaggtcttgtgttgattttcatattaacaacatactataatcaggttattcttttgttcagagtaaagctaattagacaaaatgcttaagtagttgcaaggttaataaacataagagaaagtaagcagtttctattaaatggggaagttagtcatataatttttaaatgaagctgttagaacaatgtgcaaagttgatctggatttttgccaattcctatgaaaaataatccccagaaataaactactaaggaaaatacatcacaatgagttactgtgattttttgtttgtttgtctttttgacttagttctagaggaggaagacaattcacactggctaaagtatttcccttagtggtcatgccttttggaccacaatgctgatacctttctcaagcttctcaaatcagtgggaatcctcatcggaattcaatgtctattttgtctgtggacaagataatgataagctacataagtagagtgtagaatgagtcagccactgaagacacaatatacaaggtagccagaagtgaatatgattgagaattctcattagtgtgaggagacagtttgaagtccataaggttggaaattgcaaattaatcatttgtatataagtcagtttaattcagatctgctttgtgacaaggttaggagagaatgtggggcttaaaggtgatgtcgacaatgaaagccatttcttcttatggtaagtactggcatcattctaactggtatcacatggtagtagcctatttagaaatttgtgaatctctaatcacaaaaagaattgacttccttaaaaatatattatatcacctggaaagttctgaatatattttaagtcagcgatgatgcatttgtaaaacatatacttcctttctttagacaaaggatctttatgattctagaagctctacatttctgtggacttgtattttattttttattctagcattttatgttaaatatgataaatgaatttcaagcagcaatgtaagcaaatgctgaaggactgttgaaggaaaaagaaaatattaacaagatgtatctgtaactagatttgtttgcttagggtgtctttgcttctgagtgttagtttcctttaggtagctttatgccaagttctaataaattgattatttgtagtgccttagtcttataatttaattaattttgctcatcttggattaattttggccctagatattgaagtacatgttacttgtatttatatcataaccaatgatctatgaggattagatatgagctgagatatgaagtatttaaattatatacataatatgtttcattaagaataaagtgcacgagaaagaatatctggttcattcagcagtttttaaatgtctggtaacattgttatcttatagtctcaaaatctgtggtctgaagatattttctttaggcatgacatgctcatataacattttgaatgcacctttctctaaacttaccgagacatatctgtgctttgagaaatagctatgcagcaaaccaaaaaagtgaattgaaataattacatcaagacagtggaggggatattgcaaaaacaaaggggtttgtttgaatgcatcgaattgctctctactttcagactgaatccttagcatcatattatgctcctgttttttagtcaccagtatagatcctggaattgccaggtggagagaatgttaatcactgtccatggtcacagtagatcaatatttttaaatatctttacacgctttgcccaaagaaatgtcttttggcagttgtataacccccatttaatatacctttcaatgtgacaggtttagaagatttttgtatacgttttgtaataaactgatatatattaggatacaattgtaattgcgacattaaaatgttgaagcattagaagcattagtccaaaactgtctcattcaaggaatatatttataattatttatcagtcataaattcatacattttaaaagtaatatacattataattgttcctgttatctagcaaaagaaaatcatttctttttatccagataaagagggcaagtgtccactaataattatcccctctaaaaacaggccttttactacattctcacatttcacactacttcaagatgatacaattcttaaattagaaatccattatgaataacacacaaaatattaagattttgttaacaaaatcccttctgtaaacattggttttaagataattgcaaataaaatttgtttttagtttaagggaaacattcaaaatttttcacaagaaaacaattacgtcactttttatttcaaatattccagcgaattttctagagttttctggtatattatgggtaatgtttctatgaagaattgtaaagtgtaatatatgatctttttttctgcagctttttcattgaaaacaaattcacaaagcatatctacctagataagcctagtcatctctcactgatacccacacaagttaggaaataattccttgtggtagggacatttaaaagaactaactagttccaaattcagtgctggaactcttaataatggataagcattcttttacatttgtgttatccttggttgcttctttattatacactaaatacttgagataagatcaagaactctccctagggaaacagaaacaagagaagtggttttcatatacttagcagatttccttttaattgctaagatacaatactcattcagaacattctagtccattggatcatacactaaaaaaaaatagtttatccatgttgatatattttggtctagttgaaattgagaaacaacaagtgaggtaaaaaatttcaacatctttaaagaacaaaattgaacatcaatttctaaaagttttatggtcctatgaattgtgataaaatatgctttgacacgtaaatcagaaggcctagctatcatctaaatgttcagtgattcaagttgctttcagattatctcactactgttacatagacctagaaaaatcgagccactggtcaatagagggtgaaggaagagcatgtcaactcaccgaaattcaatgactcctcgtaattgtttaaattttatttgcccataaattcaatggaaaaatggaagactaacacatttatttttcagctttttgtatgtttctaaaactgcaagctaaagtcctcacaaaaagttctaacatagagagataaaaaaactatactctgcatttacatgtttttcttagtgttttgcttgttaatatctatgtaactttgatggaaatcccagcgttgctagcatcagatttgatttaatcatcaaagagcttttggacagaaaacaagtagatttgatgtgagtatgtgacagaatcaagaattctgcagcatttgcaagctttaactactcaatgcttctttaaaacaatttttaaatgggtgtaaagaagcttttggttaaaaatatggaactttattttctttgtttaaagaaagaagattaaggtttttagtcaaatcatgattctttaagccaatgtggcacatagctgtattaaaattgctattaaattctgccaaattaattaattgttaggattctgcagtcatattggactacttcatatatctggcctataggaatgatcaagctaacactcttcgatgactttgtttatattttgtttattttaaatttacttagatatgctgatgttgtaagaaattttggaaattgtcaaacaactggcattgtactaaattcaaaaatttcacagcaaagaactagctggtattaatgattcatcatttttttcactcccgtgtcatttaactttggtcacaacacttttttgtgtggagattcaaatttctctccaacactgaaattttcacgtaatcactaacagtgttctggaatgataagttaatctagcatataatcatgttgcatacacatgctgcagctatctgcttacccttagcattgttaagcactctgacaactgaatgccttaatctttaattatcattataattattgtcttcagccagaactatggataacttagtgttttagtgttttgtcatcatcgagaggtaggagagtatacacagctaatgtgatagaatgtgtatattgcaacaaacttatacatcttccaggataagaatacaaatatccctctaatagggaaattattttatttcagaaataattgtaatgcctgtgttatttgtctgatataatgtgggaagctgtagacagagatgttttgaattcagtggagcttctgattgaaactcagattaaaagtaatagagaggttgtataccaaaggtaggctagtagcttatctgagagggagcaggtaaatgagctgtaagcaatgaaggaaggctttaccaaggaggcgcatggccctccacgagattctacaggttagagaaatgcacaaaattaggattaaaatgaaaggtccagggaaataagggctaaaagtggtgtatctgaatcgcattttctgtgacttaccttcataaatatgcaattcaccacatgaattggtgcgtggtactggtgtttggtttctgggtctgagtaaatagtgtgactatggccaaagctctaaacctctctgtgcttcacagtttctacagttaaagttgtatagtaacactggtcccaactcaacaacttgctagttgtgtgactttggcaacttagttaattcctcattgcttcaactttctcatttatgaggtgggaataagacctaccttgcaggatcaaagcagaaacaaagcacttgacacatggatattattcacttaaaagaaaccacttttctttcacataaaaagttcagaaagagatttacttttcttacatttaaggatccccacctccatttaagaaaaaaaaatattttggtaatttggaatacagctctccttcattgctatcccataatgtttctgatggttaaaattggtgatgcttgactctttctgtgctatgaaatattgaaggccaagccaaggtagtaactaatctcagaagtgttcattgcataaggaacatgatgcttaacaaggccataatcttctgccagtttgtaagggaagaaatggtctaattcagttgtctaaaatgttaacatatgggtattatttctctagaacattttagttgtgtaatttctaccatttaaatggggtgaataaataaccaaatcattgaataggaaacaactggaatgaatccatgaaggaaaaacctaaaatcctgcactagtggatgggagctgggactaacaacatatttgaggtgacatgagagaaacatttttctattctgcaacaaagcaaatggagctttggcctcaccaaggggtccttggcactaccacagaaggcttcagcttcctgtctccaagcactgagtgagctgtttggacagggccgctgatctggcctctgatcctaaagtatctgcattacttttgctgaaatgagtcagcactgtgcctctgtgaacatggccagaggagggaaagacttctctcgtaactgaggtttaaacaattggttcccctatcaaaaaattgagagccacagatagtattcaacacaggagaaggtgagttatacaaagcagtaaatccatcagataattgcattttatttcctattataaaacagatgtcagcattcttctggggaatagcctaatcaactatttatccaataaaatttatcagaaggtgtcagagaataaatttatatttctttgctatccaaatatttgttggaaaacaaacaaaaacaaggaaagtgtagatatattttgttcctatatggatacatatatattgctagagtcgacatgcttacgcacaagtcatttaactaacttacgttaaatacacaaacaaaaggcctatttcccagtccatttttcattgtccttagcagttcttggctagtatagtgcttgcatgtggcagatatttaatcaaagtttgttgaattaaaaattgacctttctactgatactcagaatttaaaacctactctaaataaggttttaattgtattttttccctgaagtttcagcttaagcagatttgatattcatttttttgagaggacaaaaacctgcccttatatgtagaattgtaactgcactagctattattttggttcttacaaaatagtttcttcctcagatctcagacaatgactagggattttatgggaataacaaggctcctaaaagttcaatctgcttaaactgactacaaacattacttttccatataagtgggagggaattcattaacactcagttaatatggtcttggaagaaagaatgaggcaaaagcacgtttacaaatatttccaaatcattgttacacagagctaaaggcaacccatctttactggatgtgtgcctttggagagattaaccatggtgaaggacacccagcatgtgcggaaggaattcactcctccaaagaactaagcaagtaggcagtgctgaattagaaggcaggggtgagggacaaagggagaagagaatattaacaaattcaagactttcagacccccctcctgctttaagcagaacaggtgccaccaagctataggaagctcttctcttcctgctactttggaaaaatgataggaataaccagagttaaatagaaaatcatttaatccaactggaccattgagaactgaattcacgttttacccgatctataaaaataatcttgtttgaaaggaaggggtccagatgattacaaatgaaatgagtttgctttcttaatttgtttccaacattttaagaaatgctaagtgtaatgttgatggaatgaacttccattcacccatccactttaaacacacacagacacacaaacaaaaaacaaaaccttataccttaacttagaagaggaacacgttatcttctctgagactgtggcaggctttaggaacatgtagaaagcaatagattttgacaccgttgatattctcatcaggaagccagcaaaatacattcgagaacacattgtttcaaagtaagggaacttccatggaagccaagttaagtagccagctgagttcttgggtgacggctaacaaggcttgtctttgcatcagatatcattaccatcactcatttattcattcttatttttcaagtatttattgaagttttctatgtattgtgtctcaggctaaatacttgggaaaacttgatgtgtaggattttataggcacttggatgagatgaatgcattttaacttttctgaacaatgaattgagtaattgagagtttcacaaaaatccaaagtgataggtagacaatatcttggatgataaagtaatatgaattaattccaacaaattagaaaaatctttctttaccaataaagttaattaggtaatccctagagcgtacactttgagggtagaaaaatattgtttccagaaaacaaacatggaagagtgagcaccactgagaagctttggtggagaggaaagttctgttggtggtaataggccacaaagtaaaaccaacatttaggttgctctccaacaagaaaaaacaccatcaaccaagacaaatgtatatgaaattagtatgagccagtcatattctctttttcactcccattaaatcatacatttactgtattagttactagggctgcaagtaaatggttgaaattacattgggattgtgaactgaatccacagtttaaggtacctgatcagagtaaagtatagaaaatacatgaaccagcctacgtatttagaattaaaaattaggtttatcaaaagacaagttattctttgaatttgttgtgagattccacatttgtgtgtttgagaaaggaaacaggaaaattatttcagaaaaaaatgataaaatattataaaatctgttaatccttaataaattaaaaatagtgcctgtgatcagaggaagatgaaatttaaatggttctgtaggaaaaccacagaggaataaaagatttgatctgtaggtcatctgaaggataatctttttttaaagaaaaagatgcattattttttcattggcagcaaaaacaatttagatatttggaggcagagagatgtctggagaaatatatattgcctctgacctgcctcttgttcaaataccttgctctgaaatactgagaaagaacctactttttgaaattacctgtaagcgacaggattatgccagataatatctaagatctcttccagtttataatttccattatttaatgacacttttttgtataatattcatgcatccatttttattggcttgttcataaatgttaactatgctttgttctttagcgctgaaagtaagcactaatgctacccaacaggagtgaaatttttagaaggtgctcttatcaagaatagttggttaagaaaagaaaatctgggttcccagacctgggctcagatccaactctgcaacttagtagaaagtttcttaagctttctaaacctcagctgtttcatttctaaaaggggattgttctaagaattaaatataaacttcttacctcatttcttggtactcatttttttctggtgatcatagttttggagtttcttatgtccttatcactattttttcttgattgcataggcctcacataattaaagcatccccataaaacccctcccagtgttgagaatgttttcatgatgtggcagttatcttggatattttgttcaggcataattggaatccgttttcaacacagctatactctatatgatgaatgcttccacatcaatggttctgtgaggagaggccatctgtgaacacagagtgcaggtcattgtttctagaaggcactccttgcacagacagcaggatttgaccttttataagcttggatgggcagtagagactttgaaaaagagatgtgggtattcataggtgattcagaattctatgtgtacacaagattccatgcagtattttataatctactaatgtgactcagctttgggtaagattgtagttctggtggtgattcacagaggtctcctagatttgtctagtaatactgtagagagtttagtcttagcatccttccaggagcaatttgggactgttatctaagaactaagaatgatttcaaataaaattacagtaaacttgtgacttgttcactttgcagataaaaccaatggttatatccagcagaaggccatttgtataataaaagatttgcccaaaggatctagcaagagaagagagctctaaaatcaatttttctaaaaatcactgaaaacattacctcattgttttgatctagctgtgaaaatagactgttttttatgttttaagaaaggatgaggagatatcacttgtttcatcatttattgattggatccttaggcttaagcagggatcaaacagtttgcactgttagccaaggcatttacagcattgagacagaagcagacctacaaacttgaatgggcttatatattttactgggtaaatttacctaatatattgaattgacagctaaaatgtaggtattcctgatgaggtacatcgataaatggtaaagaagatctacatgaaaggagtgtgatgtttttctgaacttgttagggaagctaccatgtggccatttgtggaggaaatctgtacttatttctgtattgattaggtcatttgtgccatttgttctgctctgcgggaattacttcacttggcttgctctttctgcactctgaattaccttgtttctccaggcaaaaattcttatctgtatagaaatccaagatttctgtagccttgtgagtattatttgctgaaggcgcagggacagtgataagtgaaaagtcagtattcttctactgattttgagtttacctttggattatgtttgatcaaaagctacatgtggcattgtgatttcaaataaataatttgttttattgtcttgtactgtaaatgttacctgatatttataaactccctcctgtgtgaaagggactttgtgtgcctatgtaatgtccatacctatctactttttggctgtagtcatagcagtgacattatctctgttatgatatatttagggattcttgttgaaggaagaatgaaagaagttatttcatccttaatttttttctttgtaatatgaattaccctgtaatatgtaacggccacacaaaacagagaattcaattatctcatctgggtatcatctaactaagaatcaggagctaagggaagtaggtatagtgaagccatgacaaagaaggccatggaaattaatttttgaaactgccgcaaagtacacggaaatttgtctgcatgcttcacagatctatacttgtggttgccgtttatggcacgaatgatgccacggactatcagctcctgattttacatatctttgggacacactctcccccggtgtcataggaagggggtaggtttgacatcatggtgatctaaatttgaattccatctctgcctcttactcacctagcaaagttaattaaccattgtgagtttaatattttcttcatgagttacgtataaaatacttgccacataatagaaatgatagcttgttcctgctttctctacatgtactgactatccattaaaacattgaaacttctaagaatatgtacactgaaattgtatgtatatcaatatttgttttgaaaatactgtaaagttgtggtttgagtcacaaatattgtatcagtccatgaataactggaaaagaaaagtaaaataaatttggagggttgtcacattctatagcattggcttttataaagtgtcaacaagatatataattaagtaaaaaaataaggaaaaaatactacggcatatctaaatccatatttgcactcaccacccatcttaatttgaagcagtgaggtttctttaggggacccagtgattcacacttaagaacaaacagatgcctaggaataagtgattaagagaaaatattattttttcagaaaataaatggtgataaaatagatgaaaaatggttttaaagatgcatattaagtgatgagtgaagtttaaaggaaaattgcattttcattttttttcctaatggattcacatggtttgagcttttaagtgcatgttttaagttactcttttgtgattgtttacagttaaggcatattaccttgctcttcaaatacgtgctctaagatattcctctgtaaactcagggaaaggcactacattatttatttacaacctgtcttctgccccatgggggagaagtaacaccagatagacaaaggtatggaatttaccgatattgagcatgaaattatcctttctaactaatacgtttctcctgcaattatcttctgaaaaacttatataagaattagcccatgtgagctttcttcgcagattgtttgtcctcaatttgttttctgccaagcaaaccaaacacctggaatgcacacgctcattccttgactgtgctttcagtgtttgttggcagagggtgacggttgcttttagcagatgtgcaggatcagggtggcctttttatctttctaccctcaaggagtcagtttctcagataaaggaagtggtgaggataacggatgtttcagccttaccattaaataaaagttaagcatagtaggtataataaacatgtttattaattatttgtcaaaggtagtgactttgttaaaacatttggaaagagaaatttaaagacaatgcttaatttttattaaatattaaatcttattttatgacctgaagtaaactaacaaccaaaataattttctttgttttcccatttacctaacttgatgaaatggaaaatcttagaaataatatttataggtaaatataaggatttattttatatcaatatattttacattatgtacataaaacatattgctacaaacttcttaacctaattcatcatatgcattagctaggtttactccggtaagttttaacccatgacaaggaaataaactttattttacttttgagaaatatttctgcagagataacagaaaataaatgtgcatactctttgataaatatatatgtgtgtatattgatatctacatttatatatgtatatatttgagatttcttattataaaaagaataatctttattattatgactgatggggtgctccaggctagcttattttctactttttttctttctgaattcacttttttcattgctaataaacaatatcccattaaggctaggataatagaagagaatcaatgaagagtggaaacttgcctgtacccctcttctctgcacgtcacagctgatgaaatggcaagatagtaatagagagtaagatgatgaatttattgtttcaaatgaggactcaggggtttctgtacactttagattttgatttcatagctctgccccagtgactaaaatgagctgtactgtatgtcttttaaatgccaattggtgattcagggcccatattttaacacaaatgagccatcctattccttaagtgaataccattacagaaggaagtaaatgtgagttttcttatgtcacctcaaggggaaatctcagatggtggccctccttctttatcacataggagagttatttctgaagcagtagttctcaaaacatcatatacatgagaatcacctgaaggtttattgaaatacagaatttttggattcagcaggtctgtgatggggcccaagtatatgcatttctaacaagttcttagtgatgttgatgttgccagtacatgaaccagaatttgacaactactgatctaaaacataaaactttttgccagaatgtagaatttgcatgattgagattttataatctaaaaacaaaggaatattataaaatttcaaaacaaactaatcttagaataactttgaatttactttcatttaaaaattatttttaaaacatatttttaaaggagtagatgaggatagtagattccactagacagagttacgcagtctctgttttgaatgactattgaatacaaatttctctctaagattgtgtgtactaagagtttccagtgtaggattacaaaatccactgagatataataataatcccctaatccacaagactggatattctaaaaatcaaggaaaattttaaaataaaaattggtgagcattagaggttaaaactgtcaacacaaaaatgtgaagacaaagatttataacagctttattttaattgccccaaattaggaacagctcaaatgtcctttagaaggtggataaactgcagtacatccatagagtggaatattgctcagcagtaaaaaggagtgaattactaatcgacacaatagtttggatgggtctcaagggaattattctgagtgaaagaagccaatctcaagacattgcagactgtatgatcccatttatatcacatgtcaaaatgataaaactatcatgacaaagggcagattggtgactgctaggagatatgacaaagggaggggtgtcactgtaaaggggtcgtatgaggaagttaaaaaactggaactgttctgtagcctgatagtgatggtggttatataaatttatacaagtgttaaaattaataaaaccatacagcccctaaaaaagtcaaatttactgtataatagttttaaaattaaaaaaggcagaattacactaccatttagttacatcaagtaactgaatttgcagttgtatgaggtaaaagtatcaatttatataaataaaatatgctttatttcaaacaaaatagataagaagatatgatctctatgagaatcattcttcaaaaatggtactaattccattttttccaggcagagatcctaggcaaattttggaatttggaaaaatctgactgacatagtccttaactgtgttacccctggtacccttcccctattttctcattcggtatttttcttagaatcctttcctgtaaactttgctgctttaaaaatgattttcatggacacgtttattcctctcatttagactaactgtgaaaaactgacagcctagaactttcatccagttacctcccacatatatgtacacgccctcagaaattgccatccattcacaacttaaagagcccagtggcttctgaaggaagcccataccattctgaagtagctataatttttaaagacactaaggtctctagaaatgtctggaagatcaggtctccagaagaattggcagtttaattctagccagggatctgatcaggtgatatcaataaacatctgttgaaaaaatgcatatgtttctctcagtgaacgagttaatagctaatacacttataatggcaactctgtgtgaagtacttttctgagtactttatgtatattaatgtgcttaatcctctcagccacttttgaggtagggacccttattatttgcattttcagatgagaaaactgaggcacaaacacatttggtaactttctcagagtcagtggtggagtcagtcttcaagcccttgatgtccagcttcagagtccatgcagatagtctcagttgacttagtcctaaaggcagctgtgggttgaggttccaacagcctctggtctgcttcattcctcaaagtaatctccaagcccgaatcctagcatggtggtagaggtgaggctccataaaccttagaaatagctctcccagatatgacaacatttgggccttggaccagtggtcgtgcatccactctacagtaacaggggcttctatagttaatttgattctcagttttaagattactagagaatcaaatgttgagtatgcacttttgtatgttagtgggatatctgaagcaacattactgataaaaagtaattgcacatttctggatagtgataactggaataatactctcttgtgataaaagatacagtttttacatggtttggcatctttctttaatcagtacccatgattatataggtgagtcttgcattcccttcttggtgaacacattccagactcatagattgggcatggtgatggcaggcagtggaaaaagcatgggtttttgagaactgtgtttgaataatttttatgcagtttgactttgggcagggaattttatcctttctgaaccgttttctttctttctctttctttcttcttccctccatgagtgaatgattcgttgtagtgaggattaaaaacactatgtgtaaagtgttctttttggcattttgtacatgaaataatgtatgaaaacatgatacctattatctgcttgctatgagttaagatatctgtatttaagtggaattaaatatgaacaactctgggagtttgtgatgatcgttatccaggtaccaatttttagatttactttcaaaatctaaaaatgatatgcaatatcaatttctcttggttacaaagactggtgccaaggtttttctcctgatgacatacccataagccttgtgaggaaataaagtaatttaaatatgagcttaatgccagcacagccatagaagtaaatacatgtctataaaatgaagcacttaattcctttaagtagctgccttttaggttcttttctgaactgacccctttttggcccccaggctctgatgtgtaaggctggacctgtgctgtgctgaatttcaggagagagtgtacaaatgttactcacagtgtgagtagtgagagatggagtgcaggccaatcttctgcagctgggaagagcaattagcagcttcatgaattagggtcttgtttacactgttgtccaagataatcatttgtttgttttaactaagatgctctatcttcatcagaggcatcaatcctcatatttaaatgataaagtctttgaatttcacagataatgtttggatttcacagcgggaaccccacacagcacatattctctcttgctgactttgataatcaagacatgagctatgtatattgcaagtttttcttcaaatagatatgaaaacacgatgtcatctattcttgcaacattttttacacagacccattttaagaaatacttttaacattacgtcccagcacacatacatacatgcttgtgaatgcacacagagtccacaaacacttgtgttcttcatgtagacacagcacacaagctcagattttttggttaaatttatgccttcaaaacacattttaaaatatgataatatgaatataatataaatagttaatattttaagcaattgaaaaattaatacacctttctgggtttagatgattagaagacatttatagaagacatttacatttttagaaacatgcattcatttcctattgtattctagacatcttggcgggtcctagagacccagagataaacaaagcacaatccctgcccttggtgaacttacagcctgactctcatatcatttcaaggccctaggataagtgctggagtgcaggtgtgtagcctgatagagacatcaaggtgaacacagaggaggaacagatcatgaaaagtgggcggtagagagctaggagatttgttagtaaagggttgaatctcattttgttggttaatatacaagtttaaagcagtaattcatcacatgttgtaagatgagtttctcaaaaggagaaaacctttagagaataaaggtggctggtgtgttgttctgactgatggaggggcttcctgttttataccaaaagcactgtattgttcaggagcagctcagtcaaaagacattggtccacaatgacacctgggtgtgtaaagagtcacataagttcttgtaataaaaacatcagagagctgttttatgacaagagtcacaggtgtgcattgcaccatctgctggcatagggagagcatgagaggctttgccaagggacagatcaatgttctagccctgacaagccttcctggcatccttctcagggattctcagcttttggaccttgacttctttcccctttttgacgtagagcaaagcaagaggtggtttaataaataatcatgaggtatcacttctaaattactgaaaaatcttttaaatatctgcatttacatggttctttccatttcctccaggagaacacagggggctggtctattcccaattctgaataaaacacaagatggtatctataaatgatcggcccagccaccagaggacctcttgctctcctgcatttctttgaatttgttcttagcctcagcttctgcctctgggccccatccttccagatgtgagcaggccaaactcttactctgcttccacccccttatccgcacatacaccataaaagtgcacctcactttttgccccttcaaactatccttgctattggctatagtctttgccctcgaaatctcttctgtgccatccttggagaaaggtctggaaaaggagagcaatacttgaactctcaaggaaagacagaggaaagttgcttctaactctcaagtgtgtgtaacaagaggttaagataatgactaacttcattctcaaagttcacttcttgggggataattatcagattcttgatgggtaattatcagtaaggagaatgactaacttttgactgaggattttgagtaaatgcttctattcttttttgtggggtactactctctttatcttactggatgggagatagttgtgggtttttttccctaaataatgaattagtctaatttaaccctttatcttgaaaattagtgaacaatcctataatgactcatttggaagtcactgcttagcatacttactgaaaaacaaagaaaatatgtagttggaaagctaaattgagtaactccttgtttttagcagattataaatttcttaaaggcaggtacagggctaaatctatctttgcatctcacaatttttagcagacttttttacacctagtaggagctgggtaaataatagtttatcaacttcactggcataacaaggcctaattacacacatgatcacatacacatggattacctgtacaattgaaactggaccctccaggagagcgagtgctttactttgaccaatttaaatacaaatctcagccttgtaaaacatcaaatacagaatataatttaatattctctcattgattcattgtcatagtatgaaaatcagttattgagctatatcgtgagaatggtgaatttgtgctgttaaaacttcacctcctccaggcatatccacaaggagaaatggcaaacaatgggacaaaaagaggaaaagagataaagtgactctgtcagtctttaccagtaaaagtcatggaatactgctcagcacatagaaacatgctgtaagtgttagttgctgctataattatttaggcagctcctttattagaatctttgaactgctagtatacattctctgcatggagtatagaaacttgaaaataaatacagcataaagaaatcagaacacttataaatttcttatgaccggctataaaattcaaaaaatcaacagtattcaattctcattgacctttttatgtcctgcctcatctctcaaaagagtacttttgtaggcaacaataatacatatttcctggagagagagtgaggcacagtggatgcctttgtatttattgtgttaccttgggcaagttccttgaccttactgaattttagttgttccatgtgtataaaggagacagtgacatacctgtttctggttgtgaggtaataaatgagatactttgtaaaagttttgaaacacttcatgggcactaactaatttgtaatcatagtatcttgaatgcctattatgtgtcaggcctggtgttagctattggtgattttaaaattaagtttgaggatataattttcggaggtgttcacaagtagacatactttggatttgagattagagaattatgtagcattatagtggcctctgagagttaaaggtcaaaataggatgagatttcaggtgtagaagataattcacaccattggaaagaatcatagtgtgtgtggtttatttttaagcattaaatatgtggtcccatataaaccaacttagcagtaccaattggcatacatgtgcgtactgtatgtagttttaatacttttataaatattgcaagatttggagcagtgatgaggtgccaggtattagagaggtgattaagaggagctaacaatggcttaaagcaaaatggtgattgttaacctgggttttatcactactgcaaagcattttcaacccttctgaaaggatgtcctgtgatgttgcaggtaggtttctggaaagcatactctgagatagagttaagtgtgcaggatgtttactaaggagagttcttgggaccaaccccacagagggacagggaggggagcaggactgggcagagagagaaggtgagctgcagttcaggccagaggatgaggacagcctctgctgatcctgcagaaagctctgccactggaatgaccttcagagagtcccacaaagggttgagatctcagggcttctagtaccctcttgatcatttattgaattattggatatggattattctaggaaagagtgtgcttgaggtagtgcagctctctgcagcagagacagttcaacaagaggcaacaagaccttgaagggagaattgtgcccaccaagtgaaatctaccagaagggtaaaaaaaattaacaaagattgcatattctcacttgtatctgggagctaaaaattttgatcacatggagacagagagtaaaaagatagataacagaggctgggaagggtgagtggcatagggaagaaaggatgaagagaagttgattaaagggtacaaacatacagcaagatagaaggaatagattcaatgtttgataacagagtagggtgactatatttaacaaaaagatactgtactcaggcgatggacaccctaaatactctgactttatcactatgtattgtatgcatgttgtagcatttctcatgtaccctataaatttgtacaaattaaaaaaaaataacaacagaaacttcatgatgcctagagcagacgtatctaaatgcttaccccagaattgaataaaaattgtgtattgctgctagggagaaaaggcttcactggatttgggtcagttttttcaaaaaagctgtgatctatacggtttttaaacccctaacattctccttggaaataacaatcaatcacctacaaatcagagtctctcccacctggactgaagcccagtctgggcgcatagttcttgcatctgacaatgatttaatccccagacaaatttttatactttgaactttttattatggaaattttttaaatgtgcacaaaatggagataattgtgtaacaaacccccatgtatgcatcatgaagcatcagcattttgcccttcttgttccagagaaatttttaatagcacaaagcacagcctcccgtgttgatcggagacagatctggagggatgtgtcctcggagcggggtgagatttcacaatgtttgaaggtaggaacatctcttaatagcactgacgtgagtgcagttgaagctgtcagagccacggttctgggaagtggcacgctcacccccacagtcctccggagtaatgctgggccatatactcgcatttccactgtcccagcttgcctgctgggccgtgggaattggatttggacctggaatgtgtgctgatgcctgaggctatcttaatgcttcatggcacccaagaaggccatacttggcatctcaaaaaaggtgcagggcatttaacatgtttgctttagttttgtaattatgctgtgtaaccgagggtcctcttggaaattgttgcaaatgaaagtgaactgtccagtcgtccgtgttcttggcaaattttcagcccactataaagcgaaaatcaaaatttctgtttaagaaaggagtatcttcaaaaaagcttgcagacaatatctaaagcaatgtttgaaatcttaatagaaccctgtgacttgaacacctaaactattttttaaagtttgattttgtttttaattgacacgtacatatttatggggtataatgtggtatttcaacacatgtattcattgtgtaatgatcgaatcagagtaattagcatatccatcacctcaaatatttgtcatttctttgtggtgagaacattaaaaatcctctcttctcgctatttggaaatatgcaatacaatattgttaactgtagttaccctatagagcaatttctagaacagaactttttcctcctgagtgtaactttgtacctgttgaccagactctctccatcatccctcccacgatccctagactctggtaactgctattctatcatttctgataccctgcaacttcaagtccccaggtggctctgccagagcgttcacgatgacgtcccattcctgttaagctatgcctctatcctcagtggaaacagcccgggcgttcctaggagtgaatcagcagtccgctttatcccttcgaattgagcaggaatttgttggttgtttggctccggagcaggtggcggcgggggctgtggcggttgcgtttcctctttgaggtgggggctcagctgtttccttggtcatgcgcccctggtaagtgcctggaggaggcagaaggccaagaatacagctgagacttggtctgctgccaactcccagcagctgctgctctgttctctgagctggaaccgactccaggctgctatgtggcctgatctggcattcagggaggggcttcagaggagtgtcacttgcatactctgagtgacttagcccacctgctattttgtgtgtgtgtaacctaattcaagtgagacttctccaacattcgaattacatgaaaaatgttaggtcactgaaagaaacaaacttttcgctcctttggaggccaatgaatttgcagatcttaaaggaatgattttaaaagttaaaagctgagtggaccaccctaactcagaatacatgagtttaatataagtgtgtcttggtttatatttatgtctgtctacatatgcacaaaagcaacttggaaagaatacaggactagaagaagaacagagtcttaggctttatgtggcctttatgtagataaatataaaggacaacagcattgcccttggcctaagcttttttttttaatatgataacaagatcataagcggcctaagctttttttaatatgataacaagatcataaaactctcatgaaattatgagagcttgtttttgaagtaaaaatttaaagtaagtggaaagttctgagcaaagtgctatacatggacactctaaaaatatctgcagaatcaaaatgtgtacttagataccacacacatacatccatgtatctagttctacattgaagtagttaataggtcttttcaaatgactttaacactgagttgttttgtatagtgaaaacattcatttggaggtaagaggttatatcaaacattcaggatttagtcatttcctatatttgagaaacaagaaaagaatcctctgggtaaatattgcatttgttcatgaaaccatcctcattttcaaaagcacagctgcagatgaagagctacttaatgaaccctattccattttgtaaaaagttaatacaacttccccctggagtctcctagagggcagggctgtactccagtcatcgttgtaatgcttgttctcatcaaggtatttagttagtgtatgcacaatatgtggaaggcagtaaaatgtatcctgctcattaatggttttttaaaggaaacgtgatagaatgtgtgcattgttgtggtttctaaaacacccagatcattgctcactgtatgatggctcaactgggctgtgcccatatcctcagaacctcaactccaaccttacggttcaaagaatagtggttggaagtaggagctgattaaaagtggcaaacctacttgggggatactcagtcaaggagattaataaatagtatatactgagaatgatacaaatgaataccgatgttgtcacttatacacccttccctgaatctaaacctaccaagcagaagggaatttaatttctttaaatggagttatagggtattcccacaaactgctatttttttctgaaaattttttactggtttcttgtagagggaagcaagcttagaacaaaatattccaatcagtggctccacacaaaaatatccctgaattcttaagaaattttagcccaagtcatattgcaaaattattcttgactttgttttcagtgattttgagttgttttgattttgacatttattccaagcacaaaacatattttatgataatttaaatgtctatttaattaatcttgacattcttttggcattattcaactagttttaaaatttttgttaaattatttggttgtgtgtaggtgtagggtttttattttagtttgtctttgacattaatttcaaacatacatttttatagactaaattccttttattgcacattttattaaatgtacttcttcttaattttagctttattaacaatttttccattatctttacttttctattttttgattaaatgggtaattatatttcaaccacaaacatgctttacagtgtgattaacactgcaaacaggcatccaaattaattcattattttctatctcttctcagtctttatgtttactttttccaaatataaaattaaacaggtttttttgagatttggaaaggttagaataaacatgcaacctcaactatcccctgtggttctacccacctgaattgccactggcatcactatggcatgccttcagtatttattgccagtcatgtagtaactattatcctcactcatttcaaaagcgtatggataaaattgaagtcccagaaccaatctgtcagaatttaggctctgcctcacccctagagtgaaatatttgatatgcttaatgtatctatgactcagcttcctccactctaaaatgtgactctttaagggctagtcctattatcctacattctttaatcaaaatactgtcaggcacagagtgagtctccaataagtatatttaaattgttttaaattgatactatttatattaacatttaacttaagttttattcaaaatctcaaactgtatcatagcaaaactagttttatttagcaatctgatttgtggtagtgataatgataatggtaaactaatttaagaatgaaaccacagtcattttgcattgtgattacgtgtcataatctcatgactagttaaatttatgtattaattcattaaataactaattcatcaagttattattgaattccaagcattctactagatgttttagtacaatattcctcattttaaaataacttatgtgagagagggttaagtcactttcagattcttctcaaagaagcagtaatctttttgcattgactcttggaagttggactctatttgtagcttcaatcacttcttaatatatttgaaagaggtgctagattaaaagaagagaaaaagatatgtaagagtccttctagttaattaaaaggaaatgtaatctagtcttaaattggatcataatgcatgacaagttaatttataatgaaattttgcaatggtattgatgcagtatcactccaaaatactgcactttggaagtcagtaagtcttgaagatcacctgcagtacttttattctcaaagaagaagaagaagaagaagaagaagaagaagaagaagaagaagaagaggaagaggaagaggaagaggaaggaggaggaggaggaggaggagaaggagaagaagaaaagaagaagaagaagaagaagaagaagaagaagaagaagaagaagaagaagaagaagaagaagaagaagaagaagaagaaggagaagaagaagaaagaagaaagtcataaagtaagtgagaacacaaatttccctctcaggaaattcacaatgtccctccctcagaaatttcttgctactattcatggtaaagtatcatctctgactttgttcttatccattttgggggaagagtattcctaaatatagaagtgtaaatttttggaagtgtatattttttaataaattaaaataaaatggaaacctaaaaaacagagcatttttagtatttggatgggcagcatttcttttcagttttgcagcatcaccttaagtgtggcatcttggtgagcctagtggattgccagtagagcaaatagccaatgtagtccactggctggcatgctatcttctccttgctcctgctggagtctctgaagtgtagagcaatcatggcctaatctggaattggcatctgggagtatgcccaagccccatatgagtggtcaggccacagagttgccagcagagagctagtgctcccaaaactgaaaacgaagtctaccaggatatgaggatagttttgaaccacacaggattttagatacctgggatctgccgtttttacatttgcaaattgccaagattcaaattacacaaattatctatgcacacacataaatatttaaaattatgatactaataatgccttgtgagactgactaaaagtagtcatttatgtaaatatgcttagacttctttggtacttggagattcaagttacttctctcgtcatcatgcatgttttgagatgcaacaggatctcattttgttctttactttctttatatcttatttccactgaaaatatgtaatctttgaggcacagaacacatttttctatttagcagactttatcaaatacggggaaatgctattcttaatataatacttaactataattatgaacagtcctctctgctaggtgctagcaataaagaataaatgaccccttttgttttcacagttttacatttatttttgctgcagccttcatcatattaatacattcctccaaatatttcatattctactttcatatatttgcaggagagtttttgacagttgggtcttccttctttccttctttccttccttccctccttctttccttcctaattataattatgagcaaagaaaggtaataatttctcccactacataagatttttcccaaatattaggccttagactttattaaggagactactcaacaaaaagattccacttctgaaagtaccttgctatatgttacaaatgcaactactggcttctcctttcttatctactttaaaatcttgaaggtttcacaaataagcccacagctcagaagctgagtattttatattacataagattgacagatagttcatttctgtgatatatcaaattgtaaatttgattcttttttggataattttatcctagcaatttccacatccatagtttggatgtacactcttttaaacgttcaaaaccacactttcttatgtttccgttcttttgtgtaatgccagattttcagcctccatttcagggatcagattgttccatttgtcataggaatgccacatcacattttcttttcaagtgcaaggttacacattacagacacccaagtgggtgggttaacttcacatctttctttctgaagtgtcaatttgcactaggtgtaccaacagttttcttctattgaagtgtctgtaaagtacactttaagactattttgtgtgcccatcacaaccatgtacaaagctaattaccccttccaggcacttagcttaggcattgtagaatccataaataaaatccccaaatcttcaacttcatcaacaggactccccagggagtttctgagcacagtttaaccgtttttcttcagtactgcatggaccattcagccctgggaccacacaccaatgtctgtcatcatctgagttcagattgactgtgaccctccaaaatatcaatagtttctgccaggtccttcatttagtatagtttgagaatctgctttttcctctttctttagtaacaggtaatgatagcaggttctaataattcacagagattataccagcatttatttttataagatcattgaaaagtattaaatattttgaaacatgaacattacaaaaagcaaacacccattttctttgactctggcttgctaggattgaagggtcttattgtcaggtttgtgcagggaacacccaattaggagagtccatcatgcagatgttcacctgaaaatgcttttagtcttgaatgtagttacattcaactctctcacttctccttcaaacaagaatgttttgtttaaaaaggaaaaaaaaaggaatatcagataaagtcagtcttacagcaggcaggggatatgaggaggttgacatcatcgggtcatatcaggctttttaggtagagcatgctcctgtgatcgtaattctcacattgaatgatgataggtcggccaaactcaaactgcagcccttctcttacagatgaccaaccacatgatctctttcagttattttcaaagcagggcatctggagtccgatcagcattgccacagatggacccagagcctgagtgctgcctgccacaaacaaacacacgccaattcagatggtttaagtgggaaagtaccttctggctaagctgtggacacattgaaaaaaaagaaaaacacgcagattctgctccatcaatgtgttgtgaggctcctgaaaatgttttcctcccaggaatgtattcatttatcctttcaacaagctggtatcgatagtgctcctgctctgcactaaacaacagttggaagatacactggcctgcgggccctctctgtccaaggaacttagagtctagtgctggcattcttcatctggaacatttattcaaaacgctagtatttaaagcatggccccaaacacaagtcaaatccttgacagcttagaaataaaggctttgagacactcttttgcatatttattttcatatgccatacatttgctgtaccagagtctctgtaaaggcacatagctcctttcactcccctggctgctttccttgtctcccaggaaaagagacatcagatgaaaaacacttctgcaacccgctcttcagcacttgaggtcctgaacatggacacttttcctgcagtacatccacacccattctcaggtagttttgttgttattctcttgcgttttccatttaaacacactgaaagatatttaactgtggtgaggaaaaattccaacacaatgttgctaccaaaataaatgccaatgtcaaatgaattattttatatttcaagttgacctattttcagaaagtctgaggagagtaagaatgatttcttgaacacttacatttttttctagcaaatatgttgatctcaacacagcccttttttgttttcatgactgttttcagtggtgttaatatgtaattttatgtaacactatattgggcaatgtagagaaaggaagaaacaaaacagggagaaaaaacaaaagaccctagcatttaagaggaggcagagcaggcacatgtgatgagaatatattatcttccactttgtagtaggaacaccgttgcccctgaactgtgtggcacttcctcctaaggggagaaatgacagttcgatgaggaccctgttagagtaagcactcagaggaaacctcatgcaatactgaaagaagtcaagtgtggaagaaaggagagaaagacattgctttatctagtatttttgtcacctagcaatataagcaaggcctagatgtttggccagtttaattatgataaatcatgcaattaatgatgccatcactttctcagaaaaactcagaaagcaccaagagcctgaagaaactcaaccacatgtgcatcatcagttcaaaggttcagcactctccttttatctttaatgagaatatcttttccattgtctctgtttttccttacttatatgctttagtttcattaagatagattttcaaaattagctttcaagaagacattgagaaaaccctaagtttaatgttagtagtgtcatatgtgtttatattatatgcttcagtcctctgagttgctttgctctcaaatccctttgtctgctgacttctgtaattagtttcatagctgcttcctagcaagcaccatctctttcctttccccggtatcctatccagaaggccacaaaatattctgcacagtaggagatcaataaatatgcctagctctctgtgaatggatagacccactatcacagagcttaacaagaccaaagccttcatgagatccaaacctccagaaacatgtcctggttttactttcaggtaccttctagtggctgttggtttagtttaagaaaaaactttattgccacattagttttcataggtctttgcatgattagatatcttggcctttaggtggaggatgcagaaacacagcaaagtcacatagccattactgattagaatccaggtagggctttaagcctcttttcattcactgagtcaacaaatcctactatgtgccaggcactattcttagtattggggttaatatagagatacacaaaataggcaaaaatccccatgattgtggagtttacataatagtgggaagagaatcttttttactacttggttcaaattttgagctttgttaaagaatgattcatctgctttttctgagacctggggaatccagtgattgaacgagccatcagccagccaacttaacactaaagatataggacaggcagacagcttgctgtcttccctgctgtaggctagcaatgaatagatgtatttgatgtgaggataagatgtaataatctgtgtagaaaattcagtcaaaaattatccctgtagtactcagtaaaaggtagttgtaatgatatatgtaataatctatgtagaattattaatagatgtaataatctacgtagaaaactcagtcaaaaaataccactgtagtactcaataaaaggtagttgtttcattggtgtggttgttgaatcttgcagaaagagaatgctattaagatgttaacacaaaactatagctcagagctgccctatataactggaaactccctttgttcctgtgtcttctgaaattccacaagctatgcttaggatggcagcatacatccgtttctgctaatctctctctgccctctgtccctcccttttggaagtggagtacacctcctgtgaccatagcttctgtgatcacagattctatatgctcacattttgccttttaattttgaggacttgccccctttcattcttttgcgcccctagaaagaaaatcctttcattcgttttgctgttaaggagggagctgaggtcatagatgggcaatttaaacttctatgttgattcctttttaaaaggtttgggagtgatgattttggtaataataaatctgaaaaggcaatattaaggcatgaaatagtcatttatggtagcaaatacaaagtattgacataaaacaaagatgtcatagcaatggaaacatcttattttccctaatgtatatataggagtaaacatggcttttatggacatttcaaaaatcagacaaaataacaacttagcaatttttgtttgcttttattcattttacctaaatgtctcttccttttaactttctttgagaaaggttttaataactcaaacacttagctcccattttggcacctctaactgcatcacatttgttatttcattgtttttgaaatgacagatgcttctttcacatcttggaggaatgaagaagaaaagagttcatgtcagatataatgattactattaaaattagtatttctcccccatttataaaaaatgccttttttctttgtgttgaattgtatgtttttgaaccctttaaaccagaattgaagatatgcattttatgaaaaattcttgttccattagagagtgtctccaatagaaataactgaaaataaataatgaattgttttcttgacatccagataaagaagaaacttttaaatattttattgaattgaattgaactggatgtagaatgcagaatttccagtaccagttagattaataatgcccaaacaagagtatcatcatttcagaggatcatttcacgttttcatccctgaaatagtacttcttgatataggagatcatagaacagtgatactgagagaaatatataggataagtgtgtaactcactgagattaagaacatttttgtcttagaaaagttatatggtatcgttatccacaagatcccaacagtattatttaagtacctgtgaaatttgtttcagttacacaaggaatcatgaggccattgctcaagtctgagatcctggctttttgcttgaagattaaggagatgtttttttttgaaatgttacccgtgtttcagcaccaatatggattgtaattaattgttccacattaaaaaattatgatgcctacctacaaaacctgggtatactttatctgggaataatgcaggcatgtgattttctatgtggcttttggaaagatgggcactatgagttataggtgtggaaggaggaaattgggcagctagatctcagacaactttatggcattctgatagctatgaaaaatgggccttaaggattttcaaaaggagaagctgagcataatatttagaaacccaaatgtgtccatgtgatttgggggataaaaccaagaaagagacacacatgccatcatcagatgatatgctcaggacatttctgtgcagtatttgtaggctcgttcacaaggagaaaagatagcggtcctgtgaaaaacaatgtgtgggtctctcttgcgacatactgggaattaattgcacagattaggtaaacttgccctatatttctaatagaaccatcactagagaaacacaggttattgaaaagagctctgacacccagtcaaaacgattatgtttcctgaaccatctctgcttgtagataagtctggttctagatcttgtccaaatcattgaatttaatgtcagttaggctaactaatttcaagctcctttgcagctctgtggttttctgggaatttgcattttttttttaaagtttgcatcatgctggaggttgatgacaccacctttcatgtgggtaaattatgccagactcttaatagaatgatgttggaaatgtaaggtggtgatttgcctgtatgggttatggaagtttaggccatttaaaaatctttggactggtctcaatggtcacacactcaaactgaaactaaccttgatgctgtcggattcttggcttattttctagcatgggagcagagcctttggcttctttctctgtgacattgattttggtcaaaaaaaccctccttatctgtagcagaaatatgcacaaactgggccagtcttgtgacaaggctgcccatcagctattgcattccatccagctctctcattcagattattgacatcctgatgtttgtattgttccaggaccatatccagggtaagctttgggaaaaaaattatagagttgtctttttcagtgaaatatgatgtctgttaccctttgttggtgaaagcacattggctgtacatgcattgattctggtggaggtgcaggtgttctctgaacattgcattttctctatctaacctttttattcttgccgtgtccacattggatagataaatagcaatgtatgtcaccaggtactgctaagatgaagatgatgatgatgatgatgatgatgatgatgatgatgatagcatttagtaggtactggtgtgagtcaagtactaaccatggaatgttacatccacagaactagtctgtatacatatgtgtcatcaatatgtcagaggaaattttgtaaagcagaattccaatttcccctcttatagtatcattttctgcctttgatctgtaggtgtgtatattaatttgcttattttttaatttgtattcaggaagaaaaaaagattttgaaatgtgagattgtgttagttcctctgaataacatgtcacaatgtagaacattcttgctcatagtagaagctcagtaaagacttgttatacaagtgaagaaataaaacactggcacaaggcctttcttcagatgtttttattgacaacagactttccttagttttaatggcattcatgattattatggtgctactcctttgcacagctttggcatcagttccttccacttttggcattctgctaaatgttgatcttggttatgtttgatccaggttactacacttaaaaaagaaaatgtgagatcctatatataaccttctacatgtttataaaatgtcaggctcttagattaaagcttaaacaaggatattcattaaaacatttatattccctgaaatcttaaccagaaaatttattttcttaaatgtcctcctctgttcttccaataaaatggttctctggcaattttggcattttcatgatggctcaagaatctaacagaatgcctgcacatgaggttgagtttaattaaagggtaaagctcctggttgagtgtttcttacacactattgaacgattgcattttgggtgtgtaattaatgtgaaaatttctcattgatatttttgatcaccttgggaaaatttcagacttgctaaagatattagtatgtgcattctattcatggcgttgttgctcttatttttgaaatgattacatcccaatgacttttttttacttgctttaaacttaattttaaaggttcaaaatctttcttaaactttaacagaataattgttttgagaatgggttatatgcttggcttatatagtattgcaatatttatatatctatgtggcaatttgacaaatcaatcatcaccccaatatacaagtggttttcatttacagaaccatgcccagcttaaaaagaagaagcagtgcatataagcaaaacatttcaatttcaataagtaaatcttgactgtgttgtttcatcataaagtacccattgctaatttgggttaatattcgtccttctcttgtttttagcataaatattgtgaagaaagtgactaatacagtgacactcccaacttattgataaaaatttacctttaatttccctttcatcggtgaactaaattattgccgaaatttgaatcaaatctgacctttctttcccaattggtagcacagtgattaatatgtgtaatacacacacacacacagacacacacacatacacttaggacatatctattttgatagtgatgatgaaagacagcatatcatatttggtgctttgcattttgcctttgttctccctacctttcttcctcatctccacaacctgaattgttactgtgttcaactctaaactaaagaaataagaaacagcgtgaatataaagtgatatagcaattattttacttgctttcttcatggtaaatagtttacagcattgttgattaatttcctgtagcttaatttgcaaactattgacaaccttctctaaatgctacccacaaaattatgtttaaaatagtatttccactaaaaaaagatagtaacttttattttgtgcatttatatatagtctcttctttctccttccatccttcaaactgtaacagttgaaatttggccagaatatttattaaccaaatgttgaagaaaagatatttgttgaaaatagtttgggttatttacaaaaatgaaagaaattgaaacagatcaaaatgaaatggcagtggaagagtccggttagtctggtgagcagaaagctgaagtagggttgatttcctggcactgctttctcagcaaagagaacaattttaatcagttacaaaaatatttgtgatccatatgttcctctctgctcattcccatatgcccattttctcttttatcttggtagatgatgactttatgattcaggcatgcaagaataatacctcgctgactttagagctcggtgctatttcaaaacgtgtcctggtaattacgcatacacatatatccaggctgtccctgctttgagttagttatgtgaatatcagtttgttctttctctcttcctggaaagaattatatcttgcatcctcctactgaggctggaataatgcatctaagacttagttttggaaattacattgctgttcacctgctgagtgaactgtacaaatatgagggtcttaaagagaaatcaaaagagtttctgtgatccttgagaacttcattcaacttggaaaaagtacaacagaatccagaatgcttttcgtaaccatcactgacatttatgctaagacatattagataatgggcttcttagttaaatagtttctaatttttaagacacgatgatttctatttaatattgagtattatagtagctatggtgaaactgatcaaaattgaaaaactaaaattactattgattagcaatccacttttttcctaaatgcatgtctagctctcaaaagccatataatttccaaaaatggaagaaacatagtttaaagtctaatcatccatcttcataaaacatgaataaatccagaaactattgactgtactactgattgcattttcaacagttgctttccccttgcacaacaaatggctttgtaacccaatatgttattaatatagccacagtaaaatcctgtaaggaaccagctgtgctcatttaaacttgggagaagagggtagcaaggaggagggagagagggtttctaactctcaaactacgtaactgggatgcatttagtgttttcatagataggtatgtgttggaagaggtgtgcatgctgttggatttagccgttgtgcaccagaatagcgttatagggaaaaggaagagatgcagcctgatttgggcaaatattattaggagcccgtctctgtgtttgcattcaagctgtctttgccgctgctcctgtaggagttgtgagaaagagaaagtgcacattatagcgtggattgttttcaacaggcttgaagtttgcaaatctgttgaatccctctgtcagtgtttctttgctgtcaaacagaatgcccagctggcagtggcaatcccgatggggagggagggctatggatagattgtgttcaccctgcaacaagaatattaggaattcttcttcccaaactataagtagagagaaaagagctttctcagccatgccattataaaagttttcttcttcttttttttaacttttatagagaatgtttcattaaatcaaaacctttctgtacactttattcaggtagctttcataaagagagaaaccacataaacagcattaaaatgtataatgtaatctataattaagacaaaggctttggttagaaaaagaggcaagacttttgctcataggtgatcctgatcctcattgaggcaaacacacaagcttttttttttttttaatacaaagtgcgagatttcactaaaaaaggttaaaattgaagtgagtaatcttcggtgcataatgcaattgttaattttagctccttgcgtgggtgccgttctgacttgaacagccggctgtagccttcattagagaagaagcaggcagcttgagacaggtggagctggatcaagctgtgaacgtgatttgctggaagctggtcattagtgttagaaaccccgtcttatttatttcatccttcaccctaccatgattattgcaattattattatttatttttcatcttttttcaggttgacgatgtgtcacactgtgtaagggaatcgcatggagatgggcattccgaactgttaatggggacatgggactccagttgtctctgatcacttgtgtggattttcctggcgtagaacgacagaagccgctagtaagtcgccaagacctacagcaggaattctgcaccaaaggtaaaggtcttgttgtctggctgtcatctcatctgcattttagatttattattatataaatgtgcctgcttgcatccagcagttcactgaatgtaaccatgacaggatctgtatcagagactcatttggcttgtagtttggagaattagagctcaatttgttcactccattttaaatctggtcatgttctgttttttacttaaatactctaaaaaacaagttagggcaacagaagtcccctatccaatgcactgagaaacaagctgtttgccagtggaaaatggaactttttattttgttaaccacgcatactgagtgccactgaaatataagaaatccgtcagaatgcactggatgaaatatcctaaaacctcccaaaacctgaatgcattgcttactagtcactttacagactcaaactaccatccttttggaaaacctccttttgcattcccacaatcctttgctgaataagcctgtgtattttaaagatatcattagataccatctgttttgtcatggtagattttagcaaaatttctgtggtttgtatttttctcatacttcctattttcagttggaaataaagttactgaattagtaaatggtaattgaatactcccaaagaaacatattaaaactcttatttgtctagtaataattaccattgtaatgactgggaatgggacagttattgcttgggatttttttgaaaagaactaactttctaagctacagcgcctctctctgcttctccttctccttcttctttctttttactttcttcttctctctctccccctcttccttcctcctcctccctccttctctttcttctttttttttctttctatttttctcacagcttaaaaaagtgaggaggaagtaaatgctaaattattcatgagcctcatttgacagcacatcagaaggggaagtgtcaggggttttataaaggtagggagaaaaaaataataacagattttaactctgaaaagccatttccagtgtctatagactattgtgagcctggagaagtagcatttagttgggatagcttcactagagctgcctgccaaagacttccttccacaggatcttgtcgcaccagcaactgacaggagcttgggagctcgggagcttgggagagggcttatgtttttaataatgtagctgtcagttcgaagcctggaaatgttgaccctcaaaggtttattgccaaaattagataccatatttatgctgaattattaccttttcaatagttttttttgaccttgcagactactgtattctttatacctagggaagcatgtctatgtttggaacctgcaaataatttttcagtcatcttagagatgctgcagaacatcaatgccacatcttgagtcagaagtcgagggtcatttgttcaaaagttggagaaatatcctcttttgttgcttcttctactctgtagtggagaatggggaactggtagttgtgtgggagttatgtgtctctaagatttgtcgacccattttgatggcaaggtgtattcacaagtgtgtgtaaagggggtgtggatgggacaactgcatctgcctcttgtgcatgccttgggtacttgatttcatcttgttttttcccccttttgtataaaattctcaaaattgctcatttggatttgaatatgaaaggagaaatgaaatctctaaagaatgatagtaaataccttgcactgactttattttctgatatcttaaccttctagggcataaaatcttgttattttaatttgcatctgggagaatgtctgagcaaggagacctgaatcaggcaatagcagaggaaggagggactgagcaggagacggccactccagagaacggcattgttaaatcagaaagtctggatgaagaggagaaactggaactgcaggtgagtgagcatgaagagaccctgactctcatacaactgtgtgcagctcccttcttttattttcagaatactttagagatttattttttaaagagtttcactggttatatcattaggaaatgctagtctcctactttttcaatttttgtcactttttgtcctaacccaaccgtgctctaaaatgtgttttgtggggaaaaaagtcataggaaagtatttattttctgaatttgcacacagcatccccttaccaatttccagaacacctcaaggtgtacatagagggcttctcccaaggcagctttagactagctgagttttaaaaatgaatttgctattctgtggaaagatgaagactcaattcatggtaaactaagaaaaatcaaaggcaggtgttcctttgactttcatgggcatgctaaggctcaaatcttagtagcaaacaagctaaaccctagaattcccagccaaagagagagtacttgaaggaggaaaaaagactgggagtgattaaaggaaatgaaaaagtgctgtgaaacatatcatgatttacaagggaaagagattcggtagaaggaaagcaaactgcacttacaaatagcttgtaagtattgattttcttttaactaaactacagaagtgttaactctttatataccaacagttaacaaaggcagataactgcatgatggccaaaaaacttcaaagctggcttttccttgtcccctttccaatagttgttataaacagaaaagagctaaaagttagtcaaaagttttttaaagctagggaaggaggagtcctccctaatggttgtgatgttctgttgctattattattgacttctctactgtagccggtagtgacatttttctctctttctctctctctctctctcggttgttgatttactgttcgtttttgtttgttttattttattttgttttattttctttccaacatacagaggcggctggaggctcagaatcaagaaagaagaaaatccaaggtagggttcttaacattctaggtagacctgatatcatgggtataaattacatattttacatcagagttaaaggatttgccagcatttcagatgattgtgtccagatattgtggggcatctcggctgtactggtgctggctgtttttgatggggttatgtttatgcatgtcttactttatggcactgcatattttttagttagaggatttagtgttcaaatagctgcaaatgtatgtatttgatcctgtgttcacacttaagagatttgacagtactttacaaaacaaatgaccacttgttttgtgttcacacttagagatttgacagtattttacaaaacaaatgaccatttgttttgtttttattttaaataaaatttagagtagaaattttattctcactacttgatttctgccttgaagtaaacagatactactgtttagtacacactcttcatccttttaaccatcttctcagtcaaatctcctgcaaacttagttttagtaaaaattaattttatcactttttcctcctgatattttcatgaaatgacagcaattcattcttcctatgttcccaatgtgatgcacacaatttactaaaagtattttttttaatttatctattcacattcttctttacttctatccccatcaatacagaggtatgatgctttgagccaatgtagacagtactgattggcagacttgaagtttggttttaaaaatctcatttggggaagttatgtaaatgtggagatgatttggcagtctgagaatgcttcctgtttgttttctttattttcctttccttcccttttctttcccccctcctagtcaggagcaggaaaaggtaaactgactcgcagtcttgctgtctgtgaggaatcttctgccagaccaggaggtgaaagtcttcaggatcaggtatatccccttgccattatcattaattgcatgaatgggatccacctttgtgtgcatgactcttaatttggtgttaaacagtgttttgggggagaaaaatataattgaagaaaataattcattttttggctttatcccctgcttatgcaacattctaaaatagtttaatggtttgtcacagagtattaaatttgtttttttccagactctctgaaaactgcaaatggaaaggaattcaaaagaatttagattaaaagttaaataaaaagtaggcacagtagtgctgaattttcctcaaaggctctcttttgataaggctgaaccaaatataatcccaagtatcctctctccttccttgttggagatgtcttacctctcagctccccaaaatgcacttgcctataagaaacacaattgctggttcatatgaaacttaggaaatagtgaataaggtgcatttaactttggagaaatacttttatggctttggtggagatttctcaatactgcaaaagttgtccagaaatgaatctgagctgatggtgactttaagttaatattattaatatatcactgcatatttttacccttatttttgctccttacagcaagattagtaggttataaaaatttaaatttaaacaaaattatttcatgacaaaatgggaaacttcacatcatacttatttttgtttgcctttcaggcatcatattagcttttataaaaaatggtcttgctgctgaaattgtacttattttatcagaggctgggtgcagtcaagacaaaagtaaaatggtttacctgagcccaggggagggaaaattgattaagatatcattatttttgtttggtttggttttgcttttttcctcttactttaattgaaatactctgaattcccctcatggaaacagagagcattgagagcactttctttaaaaggaccaaaaataaattcctaatagattttgtcctaagagagtgtttttttttctagcatcattttctttacatgccactcatgtcataaggcatggacaggctatctttcagtggccattactatgtttcgtacacatgctttattttacttgggctctgagaaatgtgtggctttccttcagcattttatttgtgcttctctttttaatggagattgaaaagggagaataatgtgaatatcacggcttatattattaaatgttgattgatggcttgtaatgtactgcacacaatatatgttaactctgcagaatgacagaccctgggagaagtaatgccccagttgtcccccactcctaatgccaggcagagaaggacagcctttatagacttaatctgctttttgtcccatttgacaaggtaccaggaggaaattttttaagggatcaactgtatcacagtgcccactctggacctaagtctagtgtatccatacaattggtgcagagaaataaggtgtaaatggtgctttgttcctgctggttccaagctcagaaaccaagactagctttgtaggagagaatgagagcctgcaagcctctctttggattggctgaggagtggtgggagcagggggttgatagaaaacatccagacacacatataagcaagtggccgtgctacctttttagagaataaagaaacagacttttgagtttatatgcaatgccttcattaggtaccaccggcacttacaaaatgtgcggactgaatcccagagaacactggcagatgtatacagtatatggattgtatcgcttccccaatgtttgtaaattcacagtatttggaaaactgccttcattttccagtgtgggaaaaactcttgctacctgtattacttgatctcagacccatacctgatggttcagtctgtccttaagttaaaagaattttgcttttctaatgttatactatttacctgtcagtgtattactgcaacttgaatcactcttttactgttgttggatataaacttatcctgtaccaatgtatttattaacacttgtattttattattgagcatatcaataaaaatattaaaaaataacagattgttttttaccaactctatagcacttttgtgtgttctttcaacaccgtaatatatatgcatagaaaagatattttttttcctgagtatagtatttgtcaacacatggcatcagtttgtacatttttttatagtggatattctttagcctctgctcatgcatttataatatatgtccaagcctctatgattttagattcatacatacagaggctggttgtttcagtcagttttgaagaagcaatgagatgaccttcgtggcctgggagccctcagtttcccttgatgattaactgtcaaactgaatcttccccacctcagccacgtcttctggaccagaaatgtcccagtgatttctttagcaagtagaagcaaatcctatccctagaacctgcctgaacctttgcatattaagacatttctgtcccaaactgcaataaatgactctataatcaaattacactcaggttttacaaagtttatatatgtacatccccaggaaaaatgtgttgaagttggaaaactcagctaagatatttatgatgaaagtatgttttatttcatcatttatattgcgtgacattataagcatagtgaaacagggagttcacagtggagccccttccataaaagaaacttagcttcagagaacttttctttatgcttgttagattagccaggtttactgagaaccattaagaatcccaaatttgagagggtacaagcatcaatttagtcacatgtagtgtgagcattagtttaattttcagtgagagacattattagtcattgggattattttttcctacatcataaattttaatgtcactagtggaagaaagctttgccatcaaatgatctcttacataagaataagtgggcttaacgttggttaatttgtcatagttttaatcatagcataggttttacataaaactgaaaaatatgatttggctcattcttcttcaaaacagtgaacatactatcaatcaaattgctgatatatgtgagttaatacaaaataatctattttcagtgcaaaataaataagaataaaagtggatccagtcccaatgctgtaaatggccaatcttaaatcaaacatcatttcaagacaatattatattttggaaaggactaactgatgctaaaataaaataatattaaattttatatattatttatgaaaaatataattctacttcctaccttttctaaaaggcaatgcttattgtaactattcattataatgatttattagtagtatttataaacaattataataagtttatacctagaattcctgcaattctatagtctgctttttcatagtagtagaaatcattgttgacctgggtctaaaattgagtttttaattgtaaattcagtaataggggctttctttatgtctgttctatttgtaattatgattcctagtatatgtctgtctttgtgccaatttccccttataaggaattatagaatagaactacggaggactttttttttttaatacgatggctgtgatgagagcttactgataaagaaattttttctagatgtttaaaaataaacctgtagaaaaaaataagtattgtgatctacaggaattcaacttggttaaggttaatattcataaggcaaagttttagtactagatgttccttatgacctcccattgactcctgaagattaagtcattttaaagggcaattaatttcctgacaggtttaatttttaccatttagaaaaaaaaaatctgcacctggttttcatttttctatactttataacctctatgcaaaatgggagccagacagagatgattaaacctggccctaaattattatattttttccccaacaggaatcaattcatttacagctttccagtttttccagcctgcaagaggaggataaatctaggaaagatgactctgaaagagaaaaagaaaaggataaaaacaaagataaaacctctgaaaaacccaagatcagaatgttatcaaaaggtgaatgtgaaaatatttccttaacttactcaatttgggcacacacatagtcacagaacacattctagatttcacatgcatattcacctcccaccaaaccctgcatatgattctatacgtgtacgtatctgtgtgtgtgtaaaaaatgtgaacttgattttctttctgtttatagtgtcattacttgtgttgctagacaggttatttttaggatcacatatttctttggattcacattttaatcttctgttttcagtgacaagcttgtacaaggaataaatataaatctgccctaaatttaggtttcttggaccgattaacttggattggtgaacagtaatgataccaagtttgatatcttaactctcatgtttatcttaaaagacagagagtggattagcaattctcagttcataagtgatatggtccccaaagtacagatgtatatgtcaacggaatacatgattcacattttatctggctcagaatttagtctctgaacccatctactatcaagtaatgtttatttaagaaatacccacttctacttcaataaatcactgtgcaaaaagtcatacatttacaaactcaaaacctacagtccaaactgtccaaatttttgccatacctatcatggtacaaaacaaaactaagttgaaatgaagagtaccatgagtaaacaggcttgcagtagacttaaacaaacaaacaaacaaactggacaactgggaaagaatagagcatctggtcaactgagaaatgacaaccgcctctaacagttatgtgttctataaccatacatctgcttataattgttgtttctgctgaggaatatctaaaatccaaggtgtatatgacagtaaagaagttcaggtttctaaaacagttttagaaattaagctttggacagcattaggatatttaaaagtcttgggaatatttagtgtcctcctgtattttgtaccgattaatagatagtctcataacagaacattcatttttttttttttgccttctttgttttaagagaaaaagggttccatgggatctcaaactcttgagagctctctctgtaggtgggagttctgtcatgtggggtttgtgcccttgttatttacaatgcagaatgaacacgtgatatttgactccacctctcccccacacccagactgtgcccacttcccctcctatgacatttggatctttccatattcaggatttattgggtgttttcaatcccggaatctaattttcattctgatgttatattgccagattgctagttttgaaacatgtatttttataccaacagcttcacctaaaatttatctgagcagggggaaacaggataggttggggaaaccttttctaccccacctttccaccatcattcctgacagctccgtcctgctatttgtttcagattgcagccaagaatacacggattctacaggcatagacttacacgagtttctgattaacacattaaagaataattccaggtaaattattaaatgagcctcttatttttagaaggatcaaatagaatattacaatcaaagttattaatccaacacttctaagaaagccattgtgaaatgcagataccttccctgacgtcttaaactgtctcctgtattttttttctactaatcgtttgcatgtttactttttatagagagtcttagtaactgggtagttacccaattaataaattatactttaacagttctgcttttcagatcacaaagagatactggctaaggtggaaaaatagcaaataaaaattattgttgtcaaataagccaattatgttttaatgcagctatgtattcatttacagtcaatacttggccttcgttttgttccagtttcctatttatttgaaatatactatttatttgatgggttttttgatcctagtactttgcatgccataattaacattaagactacaaaatttagatatttcaatatacttaacaaataagataaggaatactcttaaacaatgaaataaattgtaatgaatgaaatgaaataatatgtaaatggtcagcatattccaaagaagagttaggtataagtttgtagcagcatacatttaagtaatcttttccatacatttaattaattctttaggtttttggaagtggaacatacataaaaccttttaaatttaacatttattttgcagggacaggatgatacttttgaaaatggagcaggaaattattgatttcattgctgacaacaagtatgttaaacttcaatgctggttaatttgatcatgtatcctagtttggtattggagttaaattgtccattctggaaagacttagggatagataaaacattgtttaatatgttccttgatttgttaaatggagacattattggagttaggactatacgctgatgagaattgttgcttggaccatgtgtgcttctgcttgttaaattcctgacaaaatggctataaacagtgggccactgattagcatagagtagctgtaacaagaagagacccttttcatttttattatagttttttaatgggctccagctggctgcagtcagttatgcctggaaataattgtgctgcttcagtataaaccgtgtaatgacacatctccatatagacatctgcaatcacgtattatgtcacatcatttgtcctgtgcctggccccgttgataaggtatcatggactaaaatacaatactgtccaacagacattacattctctttggcaagagaaatgtgcaactatgaaacaaagatgtttattgtggcttaatcaataaatctataataagtagaaaatttttctagaaattaggacattaagtgatgccagaaatgcaataggcttagtggtttagatgaagaagaaatagttttgtgtgtatacttgtaaaaaggtattatgggcaaaaaatgaaaatgctgattccactttttcttgaattatgttctagtaatcattataaaaagttccctcagatgtcatcgtatcagaggatgcttgtccatcgagtggcagcttattttggattggatcacaatgtggatcaaacaggaaaatctgttatcatcaacaagaccagcagcaccagaatgtaagccccatcactgtacttatttagcattttctttttctcctatggattcatttataagatcacagtataaaattcacagtacatgacatttaaaatgtgcagtgttatttatctcttgctcttatcagaagtagtgtggcatttatctgtagaagattatctgagaaccaagaaagtttataaaattcagacaataaagtggatttatttcctgctcttttacatagctcctgaaacataattttctttcttccatcagtactctatgaaattacatacaaagctgtgaaaaattttgtcaaaatataacttaaattaaaaacaatagatatttttaaatgaccatgacatacacagaataattgttattttctttcttctttcttctgcttttttagacatctatcttattgtagtttctggagtaataaaaagctccgaacctagaggcagaaatcctgcctctaaaacccaattctacttactagttgtgtgacttggagcaagtcatttaaaatctgccatctcagttttttcacctgtaaaatgagagttttaagctagatgaaacatctaagacttagctctaaaaagaggatgacaagttttttccccctaaaataattgtttgtttttctcttaataccggttcattgtttcactgagtcaccaaaagcataataacatgagtagtcatttgctttgaagcttggagctgtttttcttgaacctatatatctttggagtaccatacaagccaattttataacaaaaggcatgttaaactaaaaaaactgcccacataaagcatccatttttataattttcttttttcacaatgtgcttggtaaaccgtaaattgcatgctctttagaaatgttactgaagggagcttttgtgtcaagcagagtatcatggttaaaatactctatattttctgctcaccagaggttgggacaagtggggatggagatgaggcgctttctcaactcaagcatcagtctgtgctcagcagaggtcgggggaaagtcatagtgaagagagcacaaactgagagatctgggaccaagcatggctattattaatatctcagggacaatgagcactccacttctgtgggcttcaaattacttatatatctgcaggatagtttgaactgaatcgtgtttaagggcccttgaagtttcagaatcattcagtcctgtagttgcattctactgtgttagcaaaacacattttaaaaatttatcaggttcctattttatctggttgtttacacatgtgcctcatatttgaatagtagtaaaaattaaaggtaacttttagaatcctttatatcttccctctccatgcaatactctttgttgttgttgtgttgttgtttcttattcttcattttttaatggcttttagatatcatcatgcagggacatgctgattgcaaaatagaaaagcagttgactacttccttttaatttttttcttcttctttgtctataaggtcatagcaaacatggaaaactcccatagttcaagtatattaaatgtgatacagtttcaactggtggacagtagatttatttttaacttacaccaattttgcaatcacatagtcataaatactggtacatatgttttagacatgtttcctcggagaatggctttgagaaaattaagcattatatcaagactcctggtcatctttgagtgctggctctaaacctgatctgcccggtatggtagccaaatatggctatttacatttcaattcacatttattaaatttatataaaatttaaactttaaaattcagttcctctatcaggtgagccacatttcaagcagctattggatagagcagatatggaacactgatatgattttagaactttctattgatcagctctttttaaatccttgtgtttcctgcaagttcccaaataccactggagaacataatttgtcctttaaaacttttattttctggctagtaggtatcatattactagaatttttcacttctagaagagtgccagctttttttttaattaatggccatttaaaaatagatgccacatgtttatacctttaggaagagttgaaagtaagtgtgtgcagagaacaccctctcgaaggtacaactgctacaacaggaaggccagggctcagtctctggctaactccttactcttacacaccgccatttagacaccctttcgtgagtcaaagcaaatcatgcctaaataaaaaaggcaaatgactgtatgtcatggactttcaaggtatttactgaagtgttgagctcaataatgttcaattcatagctgtcatgttctactgttctattctaactacacttctgaccatcctctatttgagtggctgttgaggtatggtggtggttcatcctctatttgagtagttcttgaggtgggggtggataactgatgtattttagcacacgaaaaaagaggatgaattaaatctctgtatccaaataggaacaaatcacagttttcagaacctgaatcattgtcagcaattttagtgaaaagaagtgttgttttgtggaaaattatgtttgattttaaaagtctgttgccatgctctttggggttgaagttcaaaatggggcattatattcaaaacattctatttaagttctaagtgtcttggtttttttggttttgtgaaaaacttcagagttgtcttatcagggcaatcaacatgtgttggtcatgggaaccatattaacttcaaaatatttctggattgaaatgtcttcatttatttaaaggagggaatactgagatgagaatcccatgtgagttttgtgtttggggaataccttttcaatatctagagttttaatgctactccagtgcaaacacatgaaatgcatattttaatggcactatagtctgagagaaatgcagaaaaatgtggattgagggtatttttgtttactaagaggtagagggaaaaaaaacttccttttatattgttcttcttcagtgacacttcaatactactctgacatcattgtttaaataattgtaactatttcagctccttattggctagaatttatttcccagaatcctgattttctagatgataggcaggttaagtaactatagaatgtgacttgagaaggttgggtttttcatggagaagaaagaatttcacataaagttcaaaatattcagatcataacaatacattctgtgaggattacatatgtgtgtgtactgcactgacctctggtatttttaataatatacccagatataatctatctgctcttttatgatgaaaacaacttgtctcaggatatacttctgtttgttagatatcatcccttacttataataacattgcctacagctaattcatttcgccaagcactttacatcttgtaataatatacattttcatgaggtaaatgtatattattacatttaatacaaaaaaaccttaccatataaataattaaagcttcattttgcagaagaagaaaattaggcacaaactgagttttagtttggggcttacagggaagcaatggttagcatgactgggacctaaaccaatgtgtctaatatcaaaaagattttttttaataatcttattctcttaaagcaaaaatacccagaaattattgagcagagccttcaagaagagtccctggattggctaaaaattgcaatccttttaagtcctttgttgtctgataaaaaacagtgattgatggacaagatatttttgaagattaactcaatggtatcattaagtaacagagcctccctacaacttgataggtcttgctagatttgctgtgcttattactgccacaagatgtgattttttgaaggaaagcatatatatatgcattatatataaatatatatttagatattatacataatatatatatttatataaatgtatattatatataaagtttaaataaatatgaagtttaaataaatataaaaatgtaagctttactccatttcactctttttttctaagaatgaaaaagccatatttattaattatgttcgtaagagggggtgaacctcttcattttgttattacaaaactactgccacagcaatctgattgttcaactccatagacttatgccacatctacaagagcatcaagtgcggtgagaagcaatgagacaagatggaaagatagttgaagtaaagtcaactgtctagagattttacattaatacattccaggtttctgtaaattacctgataagagcagagatgttatgtttttgcagtcatataatatacacagacaaaactttccagatactgaaaacatatttccagcaactacaactcaccaacaacagacttcagtggcggtggtcacacaaaaaattacaagatgggattcatgtcctcaaacgttttacactatagttatagtgggggaataacttcagaatctcagtcctcttaaaacttgaaaaatgtagtgcaactctttgtagatccaaagtagacacgtaacaaatgtctggacaatagctccataactgaaggaacagtataccaaacatccagcagaatgtatgtaacagattcattggggactacctgcccatccatttcatggttcaaataggcatttaggaaggctttgagaaagggtaagacttaaacaaatgtagtaaggagggggatacatggcaagctggagtatgggctataaacgaacataagataaaaatctctacatttttttaacatttactaagagctgggcattttgttgagatggttgtgttaggttttcagagccacctaatgaaaaggattttttaaaattatttttctaactttactgaagagaatatgtaccaaagggaaattagtgaattgtctaaagtcatactgctgcacagtggcagcaggatgctaattcaggatatttgacctcaaatccaggagactttaaaataatgctctactggctggaggcaaatatggagagaatgatattgtcaatgacagtaggaggctacataagattgaatagaatcttgaaggcgggcagctcttagagctttagaacatgaggcttgatgtgtataacctgatactttagaaaggttagtctggtattgactaatgggatgtattcaaaaggaaatgaccaagagtagaaagacttaggtgagtgctgctgtcaccaaggcatggggctggaacatttatgaaaagtaggaaataatatttgtgttcatttgggaaacagttcaaggtggtactgtcacctgagcaaactgatgcctttagagaattagtaaaggaagtcatctttcctctgcagcactgcatttttgttggtgctcagagccaaccagagtaagaacagatttgtgtatgtgaccagtagcctccaactacactttttggtctacaaattgggtcttaatagctgggactcctgtaacaaatagagtcactgagctgagaagccctccacgttgtgttccttcatctttagttagttcctgtcttctatcccattgtaggttgccagaaatatgttttgctctgacacttttttatttttttatggaattttttgtcagctgtcagattaggtgatgctgctgaatgagacccttgccagggtgaaggtattagggtccatgttattttgatattataaatgatatttataatagatttactctacataatgttacatttttgatatttaggatttaggttaaaaatatgaatagtgatcttatcaaaatattttaaatgccacaaatatgtgtgtctttctatataagaaattttgcccttctctttctctcactttccgatcttcagtttctctctcttttactcattttctgtgtttgacacaaagcagtttattgttgtcctgttagatatatttttaaccttcctcttcttcatcccagagaaaggaagcacacttagagtgtaccattggagactagaaaccatcctcttgcacaagtgttttccaaaaagccaagatcagccacaggcaatgagaatcccatgtattatctgaatgtttttgcatatgtcagagcaactgtttaactcatcccagataattttcatgttaaaagattgtcatcttttgaacattttttgtcttgtcttttacatccacccactgtcattgcctcaaatcccctgctctgacagtgcagagcaaataaaggaaatagcaaatccactgaaagagagtggatacaggccctagaaactgtgaaacaaaaatagtggccgacaggcattggtttgaggctataccttaagtgcccaaggacatatccagtgatcctgagaagtgtgagcctgggtattttgcctggagtgatgaatggtgtgtagtgactatggcagtttgtttgttgtatgttccagaaaggatgagtaactgagttggctgtttggtaaatcataaaagccatgaaactcattctagaactaaacaaagcttccctatagatagagcaatggaaaccaattgattttattaagaacccctgaagtgatggatagttattactacatcagaaaggaggatcatgggactttccactttctcagtgggtagacccagacaacagtgtacagcagtatgccaaggtcacagaacatctactgtgcttagttttctgaagaggctaaagctgaaaatgggaatcctcggtgtttggcccttaagcatttcactccctgcaggtgattaagtacatttataacaaaacaaaataaagcaaaatatgcttttccttccgtgtttattatatttatcttcctttggctaggaatgtgcgtggctctgtgaataaactgagcatcatcctgatgtggatgcttccttaatcatcctctgaagaagaccaagcatcaatttatttaagtgcctcttaaaaatctatgagtggttggttggcatcctgtcatttctaaacatggtaaatttactctgcactttttacaggaatggcagtgaaaatcatctgactagttgccaaagatcagaaacctaagaatcacattgttctcaggaaaactatgaaactttatttactgagcaagacacttcgttttttaatctatactcaggctcaaaatgagacgtatttgttcacattggtcaaactccatgtcattttcttcaaatattatattttctccatattattattctcaaataccttagagaatataagattctgtagatgagataggtaaatactagaaatataccgtaagaaggaacataagtttgtcgtattcctttccctactcgaaattatttatgagcctttgagtgtgaatgtataattaactattttgaaaatgaaacatgcgtatatgttctataacatagtatccttaatataatattttatagagattttctgtggagtcatgatatgtttaataattttatctatttatttatctattttactcatgacatcctaggtagataaagctaagccattttaaaggagagaaaactgagatccatctcttgttcttatctagtcaattcacagaagaccaagatcaaaattcagtactactgtcactcagccatgactcttctcctaaagttagagaaagaggaattaacattaacaggcttaatactcttaaataatgatgaaagagaaacagaagtaaaccaagcactgttctttaactcgtacctattgattcacttatacaaattctaatttgcattttattgcctttaaaattcagcagagaaccaaattaaacaacatcggtactaagttagatggtaaaaatatgatgccaaaaaaaagtctccagaatcaccggacacactggattcacaattgccttggcatacttagaagtgacacaaaactgtttcatgttcttaaattatgtcagatgaaaatcatttctcaagtgttcggtactgcgctttgaacaaaagaagtatagcctatagcacatgttaattcttttcacagtttatttgaggagccatgacaattttgatcaagactgtgtgtgtgtgtatgtgtgtgaatacatagtatgtaactacaggagtgtctgtgtgtgtaaatacatactacgtatcatacagtttagaagttaaaagttcatcatacatatacctactagagatagtattgtcctaaatgtataatagttttggaagaagcaagattattgtggcttgatttcctcaatctgcatctttgcttgctataggcagcagaattatgcccagtacctgagggtttcccttgtttcttctaaattctcctgtagggctgacagtgattttagcacttgtactttgggaagttttagagaatacttgaaggtgagattctggttgtgtataatgaatatgataataataataacatgttttaatgttcagtacaactcttcaaacaataaattggaatctatcaagagcagtgcacatttatgtaacacattttatcccacaacctgacttctttcaatgtacagcccttcaggtaccacagtgttctcagaggagcatagcctttaacttcccaatcttcacttcccaccttctgggcttcaagccagaaaaatgaaaaaaatatatatagcttttatttacacgtaccaaaaatatttggcaattccctgtcaagtaaactacactagtaagtctgtaccttcactgggactgaaatactgtatttgcatatgggcttcaatggaatgcttttttatataacattacaatatataagcagaaagccttttgtctcaaaaaaacacaacaattatattcaacagtttccaaagaaaacatcactttcagaaaaatatgactgccatatttggaaatacacagatcaatccattattttagtattacaatacagattatatctatcctacttaaggttaactctaaagaaaattttggatcaataataatgttgtgcctttagattttttctactcaaaaaatatgaacggtataaccatagtttctaaaatttgttaagtgctttactagtgcccagcactgggcttagtagctttctcacatgattgtgcatgtacgtaatcctcccaagcaagttaagtattttattttctattttttacaagaaaccaaacaacagccctctccctcagagaggttaaatatattgcagaaagtcacacagtaagatgcagagctgaaaagacgtaattgtttttaggcttgcttctcagtgttatgtctgtatgctttaaactattttagctattgaaactattgctatttcaaatatagtatgctagtttatgcccattttatataaagaaattaggttatgtattaaaatgcaatggttgttttaagggagtggagctttgagtcattgtatgtattaatgctactatcatttaatgttcttatagcactgaaattgaaggatggagaatttaaagaaaaaaaaaaagtacaccaatactttatccctgattttagtcagtttattaccactgataagaaaagcctgagattagaaaacttgcaagaaattagtaccctggagctgaagaagaaatcactcatcatcagttcagtgttggaagtgaaaagaagtgaattcaacatgcaaagtattgtgcctttctgtcaaagtagcaccagagagaagtaaatgatcaaatatattgaaccaaatatcacatttgtagattaacactagattatttgtttataggtttacttagaaaataccactggagcttttgaaaattttattttactttttttattatactttcagttctagggtacatgtcgggcagtggggggctgggggaggaatagcattaggagaaatacctaatataaatgacgagttgatgggtacagcaagccaacatggcacacgtatacctatgtaacaagcctgcacgttgtgcacatgtaccctagagtttttgaaaattcaaggagcctaaaattgtcctaggctaatcctaaatcttaatcatgattgagattggtgataaatcgatcaatggaatcaatttggtggaatcctcaattttaggctaatccaaaacatttcaagttttacataggggccaaacaatctgtaaaatgatccccatgtaaaacttgaaatgttttgataatctcaagaacctaggcatatatttgatgttatcctcatattttagaatatatgtgtgcagtatttcctagataattcatataagatcatcctcatatcatttagaagaattgctgttctataaagtaatttttctactgtagacattattttcatttgtggaaattctaagtatataggtaaacttgaagaaataagtctgttttgttaagctaagtatatctatctgacctgtgtgactgttaggtgctgtcgccaacaccatgctcaatatagataatcaagctcacgcacctagtatataatataccaggtctgaattgcgggtgattactttccctttttaaaacttcgtattttccccttttctcttatccttgcaatctttctctataacatcattatttagtattctcctatagataagagaaaagagatcttcagagtggacagtatgatttagttattctcattatattatcattagtaaatggatgtttatatagatagataaatcaaaaaggacacagcaataaagggagtgattgacagggtaggagtggttgacatatactagatggccttagaagcagggatcataattaaatctgatattttttaaagtagcagcgcagtagaacaattaagaattgatttgacaaaacaaaatatctaaatacctattttaggtgattgtaataatacatgctatgaaagagcatgttctaaatattcaaaatatgtgaatatgttaaatatctattatccagtaattggatgcaaaccactactaagttgttgaattggttttctatctttttaagctaataatttgcattattttgttgttatacaataataattattttcataatcacaaatatataaaaggttaaaataaaattgtctgttatcccgccatcagacatacttactcctagcattattattcttacatattatagtttcaacataaatatgatcaaagcatatttatgtttgtattaattgcttttctatgttactcaatattattggatataattttatagagtcacatatcctacattacataccttaaattacttacctaatctactatagatttttcactattttgctgttgtgaatgatggaactctgcattcatttattattttctttggattcattattagaaatcgaactactttgtcaggacaaaatgatatttaaaaatttttaagtctccaaatccacgtagccaaattgtttgctacagcagaggtaccggtgtaagagatatcttccaaatgcatgttgtttttaaatgttgtgcttaatgttgttgttcatgaaaagtcttatgttaaaggagagtcaaagagttggtttgcattcctctgcttatatatacagtacactatagaaacagagaagaataaaatgaattttgcaagggtgtttcaaaatttggaacaagagtttgagagatgctaataaagaacattggctacttagcactgcacatattaagtttataaggtatagtctcatttaaaagaaaatgaggtggtataaaatgacaaactgataatgcaaattgtgagatacacttatttaaaaagaagaactaagactttcctattttcaataaaatacatccaaaatgtacatacttttaattgaaaatttttgaaatattaagggaacagtgtcattagatttctctaatttgtttgactattaaagtgcttttgataggtgtcttacaccatcaaaatactttatactgttgtgcatagaaacttttaattttatgagatacgtatacatattggtaaccacctttcagttactcagggtgaaattcaagacttttctctatgactctacatattcagtagaattaaattcttcatttatgtttggaaaataagggaaggattaaggttaactatttggaagaaaagtaataaatctggtcttaagaacctgactgtaaggtaaactattaaaatacttcaagataagaaagattaaaaatactaataataatgagtgctcatctatttcaagcttcaagggggaaaaaactaaaactgggactgaatgactagaacacaagagtttgattatcttcactcagccacactgtttgtcaattcatgagctatgcccagtgaaggaacaatgaagaattaattctgacttttcagaggtttgattggggttgccaagaaattgaccagaaatgccagtgctcttcactatacatgaacaatgagtttcacagtagttatgtgctacaaattgtggaaaaacatatttttaccttcagaagaagaaagtatttttcacctagaataagcattacatttattttccatgcttttttgatgataatatagagaaagatagaaataatgccatatgtactaaaatctaccagaaaaaaaaaagttaggcatgaatgatgcagggctgtaaaatatatagtgaagtctagtcatcattgatttaataaataccaccaccttttgcagttttgagaatgttttcatccaattacattcacatattaatacattaaaagttatccattatcattttaaataaaggtctacaatacattattttagttctattcattttattgcttagaaataatattgctacggtggtaaattaactttgaaagggagttgagttttcaaagctataatataatggtacattaccagtaataccagtaatttttagtttaatcacttgcaatacttcaggtatatgccttagtttgcatgagcttaaactgcaaaattgctctttagcactataatcataaacaattctctataaaatcaacctagaaaaattttattagattcacttgaatttttaagcaaaattcaaatagtttctccatgatcattcaatatttctggaaaaatacaaaaggattaataatttgaactattaaattccaatatttgagaaaaacctaaggtgtttgaaatgcagttattaaggatgcattttgcataatttgtattgggaaatatttttgctctaaacaatatttatattattaattagaataagccttatgattacattttagttatgttgtagatgcatttttttccaaatatatgaaaaacaaataaatgactactacaaagaaatggaaatgatatttttaaaataatgtttaaatagctcttttaaagatacaatgacacttgaaacttagaagttccaaaactaggaaggccacgattttcattcacacttccatgtcttcccaagatactctcagatttaaaacaaacaaaaacatttgtttttgtaacatgtttaattttggtcaatataaattgaaacataaatctgatttttaaagatctcactaatgctctaaatttgaatttatactcctactaaccaaattatcttctgatttataattataggatttaaaatttgatatattattgtgacttttttaatctgtccctgaattatagtgatttatgaatagccgcgctaaatgttcatttgcttatacattggttaatttatttattcagccaaatgcctctcaggtaccaggcatggttctaggcactaagacttaagtatttaaaaaagacaaggtctgtactgacatgaaacttaaattctaattctggttagtgctttaatgcttttcactttaatgcttttcaacctaaataagtcaatctataacaaattcactttatgctcatgaatcagaaagtccacattctgagataattttatttgtaaatgaacaattacagactattacaaacaaatacaaacaaaatttctgtaaatttagaagttagtaaatcatttcacttaactggagtttatcagattacagagcctggggatattagaagacaccaaaatagcattgatacaatcaacatctgtatttaagtcagcatcctaatttcacttgctatggaaaaaaaaatgtgtaacaacatataaatattggatgaaaatgttggaatgcttaaaaacaatctggagaatttctagtgtttacagggaactgcaagtctacactgtaatatctttacagtgtaataagaaattgaagtgtcttgtgactatgctacactgaaacatgtttaatttctctactgtaaatggccttttcattgtaaagtacaggtttacttctttagaatactaattttaatatgtcatattcgcactttcaggtttttggttacattttaagtttggtggaaaacatttacattgaaaagtaggataatttgatggaggaattttgttctttatcttgaggtttgagggccttcagcccactgtgtacaatatagaggaacaaaactgagtctctgaaaggatgtgaccaggctgtgtgatgcctgtggcttactgggcaaattcataaacgtgaaatcaaaagaagcatggagggatggtttccttctctttaaaagaggcaaaaattatttgcttctgcaccaaacttttattgtaaggatcgaataagatattgacaccatgttccaaaaattatactcagttaaaaaaactctaactgatattattccagttttttgctattgtctgctcatcaaaattattataatttatgtacacgtatttaaggaaagaaaaaaatgcttctcatcaagatttgaattatacacttaaactacttctttattttcaaagtgctatttgcttattttggagctcggagcaaatgataagtttctcttaattactggtcactcatattacacaacagacactgtgagtggcttcctaatgactcaaagcataatgaacgctgtagggacagaaaaccttctaggcttcagaagtaatatatcagatatgacagagaccctttaatgagagtcataaattttaactgtctaaaccagaaacaaacgttttagcacttcctctgtggatgaacccaagtccagatcattcattgagttctgtggtctgcaatgacaactgtgagaaattaacaaggaagtggagccctttcctttaataataccaaatgattaaaaagacctaaaaaaaatcaattgactaatcaatagtgtgtaactgcttgaagcattttccccatgctaatcaaccattaagttgtttaaactaaatacctccattttctccaattactgaaccgatttacaagacatggtcaagggtgtcagagtctactggagccagattccagagctttcgttattggaggagacagaaaataatttttaagtgatcctctctcactacacagtctaaagactcttaaaagggaagatgtgatagaagatattctgccagttccagacattggtgaattaatgtgttactctcaagttctaaacatgtatatttgtttgagaatatgggtaggaagttatttgaatttaggagtaatagaggtcaaaataactaaagaaaacatctatacaatatatacaggcaggcctttaaatttgtttttcaatttcagccatgatgagcagcatgtagcaaacaagaccccaaattcaaaacaacaaaaagtattctaacatgtgaagtgacatattattacctacctgtatattgccagcaactctagtatgaaaaccacttgtaaacttttaagttaaatgacactgtgggggaagaacaacactaaaaaataactttaaacaagggggaaaaacttttttattgatatgttttactttgctggcagaccagagcaaaggttttgtgaacatttaaaagatgaaaaaggtgaagaatcccagaagcggtttatcttgaagcgagataactctagtattgataaagaagacaatcaggttggttctcaagtttgagagtggctgacattgttgtttttgaaggtgggctgactgatgttcatgtcgtccctctgttgtccctgccttccctccaatcctcccctgcctctgataccactgtcctatctccaacctccttctcctccttccctccccctttggcattcaatgggtagcaaaaaaaaatatgtcctggttgctttagcaatggctctgtgttgggctgcatgggtggtgcttggcgcagtttccgctgcatgtctgggagggtcgggatgccacaggctccgagctgtggagaaaagctttgtcagtcgcatatccagatgtctgtgtaactatggcagtcgttccactccctacagctttgtccttcagttgtgcacaaattgagctggattatcaatacggaccgatgatcaaccggtgtagctgtaaagaacaaaccttgttatggtgaggacaggtggattttgcaactatcctaaaataagtcttcagagaaaagaattgagttcatgttttagtcttttatcccctctccttcccatgttttatggtccatgtaaattgtctgcttgttttgcatgaagtgtagcagaactttatccttgtgtattttgcttgtgacaaaacattatgttgttctagagtagccttatttgtggtacccggacaggagcaaagagaccttactaaatctcttctttagattggcggggggctatgggatccagggtgattagaagaaagctaagtaaatggcaaaaaaaaaaaattccataaatttttaaatgatgataacaatagaaagtcatataaatgccattacaattatactttgtgtctctgacaatcaaaatagactttttttgaaaatgactttgctttagaattcttaaaggtaagacaatatgcatctcaagttatcattttaatcactctcggtgagtcattcagccagtatgtgcatctctgacgcactttttaaaaacttgttcatcatttgtatctcgtttcctcccactgccaccaagctacaccatggctcctgttgactatgaaacatgtgcctgtgtcatgtttagtgggtgtctgttgaatggatggatgaatgtggttagtgcagagcagtttgtgaggaatggaaagaatagatggaaggagacttaagatgcaggaagtagtcagaaaataggataaagagcagtcctcatgctgggttctttgaagcattactttagagttcttggtattgactcttgtcaacaaacaggtttttaaaatttagcctgtaaacctgaggtcattcattctatgctaaatgcaattcatgggatcagtcactgaatgaattacacaaattagaagatgaagaaataatgtccacatcttcctttctgttaattactttctttgctcacttgctttttctccagtccccaagctttcaaaatgatttcttccctcagctaccttgaactagccacttcctcttttttcaccggcattctgcctccttctgaggagtcagaaccacacaggtaagcaagacagacagagtccatcagtgatgagccatcacgtatgtgaattggctgaatacctgaggcacagtgaggtgcactcgttttggaaacacctgtgctacttgcatccagtgaggaaccaaccagcagcagtaaacacctctcaccattgcatgtcatgcacacacatggtacatgcacccaacacagcctcctcaggaaacagagagaatgagatttttcaggctccatttgtttaagtgaacatttattattcttagctgacagttgcttaaccacagatttctaacaacgcaacttggataaccctcctgatttcttttttctgttcagcaaaacagaatgcatccatttagagatgacagacgaagtaaatcaattgaagagagagaagaggaatatcagagagtgagggagagaatatttgcacacgatgtgagtagttgttttaattgcctctttagtgcgctccttccaacagcagtaaggcttcctcattccccagacagcgaggtggcagggaataaaaaggctggagccagagaacaaatcaaactgaagaaaactagaggtgattttggaagaggatctggttcagggaagtgatagaaacctagccaagggtttgggtgtgttcttaggatatgactggtgggggcatgtagagaggtatgattttggtcagtgatacagaccttaaatacagaaagtgtttgtcagatttgaagaaatgccttcacctccacattagccagcagattacctacctagtgttgttttctttttaataacaacattgtacagggtaaagaattacaaagaagagagaatctgtttatctcacacacacatccatatacaacgagtattttctgggttgttagcaaatatggacatttcattatactaaatttagattatttttctcctcaatttcaaatcaaatctgtgaacagtttgtcaagggaataatcataaaacaaatccgaacaacaaaaaaaatggttggaattttttatctttacccactatggtcaagataaaatgcaattaattaaacattaaaaggtaaaaaaaagtagaggctggatttaaatgcaaggaaaagggcaagcaactgccatagcgttttcattccatgcaatcatttagcagcctcctcaaatgatgtgggttcttccccctgcgtaagtagaagtgtgagctcctttgtaagactccgtggccaacatggcaagctttgctgagtctagtggaatatctgatctcctgctgtgatctgcttctggagacaacacaaagccagcccagagaagtaggcttcagtgcttagcttggaggaagactgctgtcctgaaaagtttcaggccaaagccagtttctctgatcttccagctggtctggttccattaatatgaaagtgcaggggagattcaacctcctccagcactgcacttctttcacgtttatatctcgccccctacaacccccgccacctttcttgaacacactgaaatagaattttgaagattggatgatccagctaagagctctgaaattagaagagtgtgagagagagggagatggaagttaccattgttggaggtctggatgcaattttaggagactctgcatatgtgtaggctacttagaattttattatggtcagaattttagataatgcaaaatacagcctgacatatggtgggcctttaattgtgtttggtggatacaagaatgaagtgatgagatgatcttttccagtcataataaggatgcctacagtggcctggaaagtagcattttcctgtctgaagaccttcatagagcttcatagagataatttttttgaaagttaattcattttttgttcttattctctctctcttgctctctctctctctcaaacacacacacacacacacacacacacacacacacacacacacacattttctctcacactctggtcctggcaggtcaagtaatttatgaatgagttatgttgaaaagaaaatacaaatcacacataaaatgcacatgcaatattatgctgtttttaaagttgtgtcacattgttagacacttgacagctaggtgacaaagtctgtcactaatgcctgtctgtaatgaagatgacacctgtcctgcttatttcatttgccaattctcatggacaaagagaggtcactgggagacagggtctgcatgactttctctatacattgcatttccttacaaccttgttaacgagattaacagctggggatctgggttaaacattttaggcaagtgttgctatttgaagcatctatgcccacatgctgtatcaacagtttttaaaaaataaaagcacatttaaatgtgagaaatcttaaatgtcaagctattgccatagctttttaaatccatgaaatcatttggcagccttctttaaaatgctgtggcttcttctctctgtaggaatagaggtgtgagcccctttggtagcctccctagtggccagctcttccggctttactaatttgagtggaggaccagcctgtttctagcatgctttttaacttgatatcctagggcagcgttttaaattggcatcaggtacccagactatactcacagaagggcttgaaggattaactgaagtcccagacatcatttgcaaatcatgttcatgaacacgtgtgcattttttaaagaaatggtccctattgtatatcatattcttacaagtttccataaccgttaaaaggctaagaccctttctcttagagggcaagaaacacctagtgtctttctctatctgtatagctctgctagagatatgcaatcataccactggtattttctatgtgttagctatttgttgccttataacaaaaaattccaaaatttggcagctgaaaacaaacacttatcatctcacaatttctgtgggtcaggagtctgggagtagcttaactgggtgattctagctcatagtcttacatgaggttgcagttaagctgtcaactggggctgcagtcatctgaaggcttgatcaagtggttatctgctttcaaactctcttacatgattattggaaggcctcaattcttcactggctataggctggagatctcagttccttacaatgtaggcttctataggctgtttggtgtcttcatgacatggcaactaacttcccctgaagaaagtgatttaagggagaaagagagagaaagcccaagatggaagaagccacagtcttttataacctaatcttggatatgatatatcttcccagctatattgtcttggacactcagatcaacattggaacaatgtggaaagtaccacacaaggttgtgaatatcaaaaggcagggatcattgggggtgaccctgtataaagaggctattactgtatcctctattgacacaaacataaaggcagcacactttaggggaccttcatctagtacttccagatccccaaatgatcattactagtgcccaaatggctgaggcacaagatcattctttcataagatgataattacagtatattaaatcaattagagaacaaatgcaaagaatccagcataaggaaactgtgttacagaactctaatctttttcatagctggtctttagtttagtttcttcataatttgaaaactgagctaacaaagcggctttccttggcaattattatttaagcagtggagtgatttaaataggttcaaatattgcttaagtgtatttttttgctacttgaagtaaaagtagaaagttcagaaatacttcctggtatttacaatttagcaaaagtcaaatttattttaaaatcagaaacattcttgaatattttccaaatatatcttggtgtctaaggtgtctgtgtgtgtgtgtgtgtgtgtgtgtgtgtgtgtgtgtgaaagagagagagtgtgtgtgtgtatgtgtttgtgtgtgcttttgtatacaggcacataaaatatgtgatttgctttggggattttccagaaaaaaattcaaatccactttgagaattttgagattttgagataagacaaatttcttcattatttgagaactaaatagttgtaagtcaaaacaacaatttagaatttagtacctaaataataaatgtattttttgtagtcaatatatttgaaatgtaattcttttttcctttggcaaaactttatatttaggcttattttatggttaattctatgcaatgtaactgactttgggaaggttaaattgataaagcaatatacttgagaaggtatgttttgcctggaggctaatttctgaaggatatttgtgtataaatagagattcagtgaagagttcatctgtggtcctcctaacatgtgctgggactcctcttcagtggggatgggtaataagggcatgtggtgccaccagagctgagggtgggatgtgggagagaactctataacccattaagcaaaatcgtttttcttcttttgaaaagaagcaagccttttatatccgagaatgcatataagtgacagctttgaatgttgcacttaattactgtgacaattttatctttctctgctattaaaattattaatactactttttttaaaaaaagtttattttcatcagctagtgaatcacagcccataactgtatctatcttatttatgaaaatgtagttgaggggataatgagataattttttaggaactttccaaagaaaacagaaaaatacttgagatattattgggtaaggtattttttttttatttttttgagacaaagtccctgtcacctaggttggagtacagtggcatgatctctgctcactgcatcctctagctcctgggctcaagtgattctcccacctactctaccaatagctggaaccacaggtgtgcaccaccatgccccgctaatttttgtattttttgtaaagacagggtttcaccatgttgcccacgctggtcttgaacccctgagctcaggcgatctgcctgccttggcctcccaaagtgctgggattacaagtgtgagccaccactttggcatgggcaaggtatctttgacttgcttgtgtcttactttttaatacagagtttggggttcttaactctcccccaaatgctattagattgagtctaaagaggtcactatgtccttaattaattccttcagacaaatagagtctcaataattccaatatccagacaaaacattataaacacaatcaaccactttccaactatgagagctgagaagtagcaaagtatgaactcataatgtatatctaagctaacctcgctttcttttacataccttacttgactccagccaatagtaaaaccaaattaaaggaaataaaagaagttaggacatttagtgtactgtaaagagcccttcataggcatatcaatggcacatcatttatgcttgtttccctttcatatataaatgtcaagttttttaaaaaagctattctctgaaaagctttatcttttaattgtctctctttgctttttcttaaatgaggtttttgcatacttgaaattcaggatgcatgttaagtgcagcaaggttaaagcataaacgattctagagacaccttcactgaaatgctcataaaactgagagaaacaccatgtctaaatctagcccattggcttagtggaaggaaattatttctctaacaaaatgaacatagaaaccaatattctgcctgcctctcagaagtggttacattagcaggatcttttaagtcaataattggttattaaaaggttattattacttctttagttttattttatcttaaaattgacctgttaagtctctatttattcctgtaacaattcatttattcatcatttggaaaatctacgtatatagcaggatgtgtatttatttatgtttagaaacttaagtactttggaaatggttttgtgttactttctaaatacagtcaccctattataggaccacagcaccatatcttgtctagacttctcttttgtatttgtttaaatttaatttgatccacctttcctcagcatgtaatggtaatggaattttgtcctccctacattgtgcataaacacaagatagaagagaaatgaatgctcggtgaatagaagctaagaagaaagtcattgattttctatgtgaaaaactggcatatattagatggagcttgattttttttttttaattagcgtattttcatcctcacttgtcttctggccttcccctcttacttaagatcaataattgatggcatttcttctattttgagagtctttcagtcaatctctttatttcatgagagtttatcatcaccaggtaataatttcaggattgtggctttatggctctcccattcttaacgtggatcgcatggagtctgcacgctctgctttgatttgaaccctttcccttggcttctgttgtttggtggctgcagctctgcagctccagaagaaaccactagctcggaatccgacggccacacgtttctccagctgtttcattcacatttctcttcttctgacctccatgccgaacagactaaatctaaaacctggagacgtcctgaaggaaaaataccctatgctgcatgagaattgtttacttttctaatcctaaccaacctttttccttttttatttctatcttttgtacctatttttcttaattcttttcccctatgaggggaaagttagttttaaaatcaggcaagtatttgggatccctcagcatatccagaacttctgatccaatgccttttttttatttttcagtcagtttgctcccaggaaagcctttttgtggaaaacaggtaaaataaaatttacttttccatgtctttagaggaacaacgtctgtcatgtgtgtcttgtgtattcataaatatatatcccatatatgtgtgtgcttgaatatatgtattagcagatacatatatctatgcgtacacacatatatgttatttaacacatctacaaatgatctaatttggaaaaaaaattttctttcagttaattccaaacagaattgtaaaactttttcttatttaaagtctcaatttctggtccttgcaaaggtatacttcctattaccttcaccaggcattaagaataataaatatggagacatcacaggaacttgcagtttcattggcttatttagtagtctgctagaggcatgcatatatttggtattattggccacttcctgtgccccataacaatatatagctatacaagtaacaattggaataatattttcagtttttttattctaaacaatctatttttcttcataaaagacttgaccttgaaaatcttatctaaactggcctagatttagcagtgtacctggcataggagttagtagggggaggtagttgttgtaaaataaatgggttataaaatttaaagaaaatcttggtgataagagcaaaaatttttcaaacttaatatatacccttcaaaaatcattctaaattgacatatatattaaaatgccccattgatttaattgcggatactcagggcaaattaaggaatccaaattaactgcactaatcacatttaagaggcatcaaaatgagcaacttgatttgaaaatgtggtatctataaataaagtggtggttaattttatttcagggttttgcttaatgtgtattcctataccattgattaaaatgaagactgtttgattaaatgccagtactcagagaaatttaaactggacattaaagatgattggcttaaaaaattccatcattcatatttgcagttggaaatcttcaagtaacgtgactaaaccccttaatagaataacctcttcagaagaagagataaaattgagaaacacataaaagggattcacagaaaacttcaaagtccatatatatttagacaaatattccctatttacagtaaaatcagtaatccataagcattgacatcttgcaggtgatttctaaaggattccaaaaatactctatctttgccagaaagattaagtgagcattcacaattcagattcatgggaaaccttattctctcgtcttctagccaatgattttccctatcttcctccctaatcttatccatttacacttgagtgtcccttatattatgttggattatatccaacattacaataattggtcacatatatatgtattgccttctctttaggttaacaggtcttgatggtcctggaaaccaaaaatctaagtgacttaccaccaaaaataaatacatttcttggatatgtgcctctggaatgccaatatttcattatgccaaaatatgaagaatagttttaatatattactctaaaaaatcactactaatgtatttaattaaatctctattatacctatatcaatctcttttctcctcttctattccctctgcttcctctttccttcttttctccttacctagcatcggtgtcttaatcctagggtagagatcttaatcctatcctatgggcattaatttattatggcaaaattcaacatcatataaataaaactttgtatgggattgatttgtgctgtagtagagtacacatccatgtaaacacaaggcatttagtacccttaggttttatatcataaaaatcatgtttttcatttccagtaggctcttggaagacagtaacatatgcaatgagacctataagaaaagacagctctttcggttggtatggtttactttcttaaactgtgtttttttcaaattatgtggtagaatcaatgttaaatattagtgtactcgtgtaaaatatatctgttcatttaaaaaagtctggttatctctttgtaaagcttgttaaatagctagcgtggaagtcatattgggtagtatgagatatgagactggaaatctatcacttcgtctacaattcgttagggttcttctggttttctgctttttgggggctaactttggtagcacactgttttgattttcccaaattaactttagtaaattacactgagttaaattttcactgacagattgcaattgtacatacattctcaacactggaaaataaatcaatgatagccctacttgggcaactaatttttaattttatctgttatattatttcaaacagtgtgttttcaagggtgaattttatttctgaagaaagatatgaggttcctttcaattaaaatgaaatacttaaattaaaatctgtgtaggataaggggataggatgataatttttttaaagttctatactagactagaagctctatgaaagcagagcgaccatacccattttctcactgctctattcaatgtatatctgacatccattgtagagaaaagtgtacacagtactataagtatactcagtatccaatacatatatttaatgtgttaatgtgtttatgagtgttaggatttacctccgttgcaggaattactacaagaacaacaacaaaactcttatccacttaaaagaaagaaaatactaagaaaatcagatgaattgaatgttgagaaagtacattttctgcaataattctggactttagaactcattatgagtaaaattaatttgttatcttacactttgattgaaacaaaaaacagaagcttctttttggacttctttcacttttctagattgaactattaagtttattatgaagtcttccttatgtatcattagacaattaattttcttttccacacttgaagatttaagaaaataactttgcacttcttttgaaaactcagagaaaagctaaaatttaccattagtcctgcgctcacacactgtgacctagtttgtttagggtgatatagataaaacatgggttcttgtcccctaaaggccagttagttttacataatcccaaatctgtccccaagccagagctaccatatactcaggttagccatctcaaatatggatttcatcacccacccaaatcaccaagcacagaaactcagaagggtaacttagcacaaagccattcacacaattgtaaaagcaattcaagatgtagatcatccctagcccgtgcaaaaaagatgcatttagacataaaggaaaataaatattttcagttatgttaatcagcacagaagcagagcttaaaatatatgcctttgtaactaccttggaatgaaattctagttacttacaagagggcccagctccaatgacagatatctcattactatcatcttcctggattccagtaggtgattccagtaggagagtaacctgtgcaaaaaaaaaaaaaaatgcatatagacataaaggaaaataaatattttcaattatgttaatcagcacagaaacagagcttaaaatatatgctttataactaccttggaatgaaattctagttacttacaagagggcaagctccaatgaccagatatcccattgctatcatcttcctggattccagtaggggaggaacaagactgggcttaggagagaagggaagacacctgtgcatgtggttttctacaatgcctatgatcccacacccaaacagatttggaattcaatactggaccgcacttcaacactgttaagatgatagtgcaatataaaatagaggagtacaaaatatattttaatgtataaatacctaggaatcataaattagagttacacattatttttgaatctcattaatgctaactccctaaagcggcaacttaaattttcttttttaaatgtacagattatggcttaggacagtgatctgagctagtgaggtagaggtagagaagttaaagaaatcttaggttgccttattgagcaggtgatgtgacataagtctaaaggaacttcttacagctctaaaactagctctaccagggagaagggtgtagactacaacacactaaattgcacccagaaatagtggtggccaccttctttacctaaaaggcacagtcacactggcttttacagaaagtctggattcctgccatggaggtgcagagttcatggctaaagagattattgaagcagaattagtaatgggaacaagggatcacccccatatggagagcatccatctcatgcatcctgtactctgaggctaagcaccactcccaaatcatcaagccaatgtttttctataataaatatttcaaattagctgcaaatgagattattgtcatatttctggtgcattcacagttgctaaacaatgattttgctagactttgtaaaacatagtttaacatactcatgattatatgggagaagaatgaagttgaatttggagatttaaagagaagacaatcagaaatggaatagcaagcccttgaaaaggctatttatttctccgctctatctcccaaggctttcttgaatgtcaaaggagtttaagaggtaaagccacctggtcattggtgaaggtctggcattcatacctacaacttggttttcatcaagtggttcttatttctaaaaccagccatccgtgtggtactgagaacagagagaatgtaaaatattaatagaggatggagggcactgagtattttcatctaatctttcactcgaaagcgctttttgttttgtgaatattctgtaccccttcctccctttgctttacaaagttcctgtcacaaatcagttatttcatttttatttcttggatccatttatcttcttatgtttggctgaaataaaagaaaaagtttagtgagtaaagttaaagcaacacttaaaattttctttgtactgtctgtacaattttgtcggtgagtatttcaatcacatagtgcacttcaaacatctcaacagtacattattgtctttaaaatatttttcaatgaagctaccaatcacatctgtgagatttgaatcaaggcttaaatatgtctcattgttaatatgagttaggtgttatatttactgaccaagatttatattccctttacttatttataatccattaaaccttaaggtattttacggatgcattatttttatcttcagaaaaagctttgaatttattaacaaagttatgctttagacagattggaaaccaatgaaaatgcaaatttcgtcaaatttctctataaaacacatgcaattttgcatatttcttagagatactctacagtcttcaaacttcacttctggctattggatctcttccaatacatttactcttttttctatttgaagtttgaacaaatgtgttctttcacctgaggagctttttttgttatttccattgttccccttggaaagttttgtgtcagtgtatagtgtttacactgttgttattttcaaaagtttttctacgtgaaaataattaaagggttctttcctctgaccatgaaggttaaactcagtgggcaaaattcttaccataggttaatagagtaatttctgtgatttctatcctatctgtcaaagccttggtgatttcagatgtgtatctcataaagctggaacatgaattaacagcttctctggatctatgtgcatttttccattgacaattattttgtgctaaagagagagaaaaagtcttctttggtgggagttacttttagaatcatttaagatcacaattacttctgaacattaattaattattgatttgagtcaggagaagttatccccctattctatttgcaagagaaattaacaattacattttatgacatgtctttctagttgtttctccttcaccgacagagggatcatgtaacatttctaggtttggtttttctgtttgtaacctatgtgttatatgtgatgtgtcatctgtctatacatcatcaaagtatttgtaacactgggaggcaactggtttaatgaaaagggttggcaggaagggtcttgtgtggatcaccttccaagaaaagccttgctctgtgcctaccaacaccatgcatgtaaggtaatcctgtccctgtgcatctttctggtggtcgtactccaggggcaacagagatggctcagggagaacatctgggagtcgacagagcagctcagaaaatgaactcaagtggtctgaccaccaaagggcctggagcagcacagactccgacagttccaaccgcaatctaaagcccgccatgaccaagacggcgagttttgggggcatcacggtgctgaccaggggtgacagcacttccagtactaggagtaccgggaagctgtccaaagcaggtagttagtactgaatgtgtttatgtcctgtggtattttttggattctacccaagccatatggtcaccattccctctgactttcagttgactgataatgatgatattaatcacagggatagctggaaatcagaaggtacaatttaaataggttactgactctttccagttatgtgcctaggtcaagttactaacctctccaagtttcagttttcttatctataaaatgtaggttatataatgttattcaaacccatctcagtagacttagtgtttatgtatttaatttaagcacttaagtttacttatttaagtttactcagtaaactgaagtttaaattgcattatttatataaaaatgattaccatggcacctgcattacagtaactacctagcaaaagtttgctgttccttttaaatttagtaatatgaattattccttaaaaacacgccgtaggataattataatattaatagctttcgttcttgcattggaatgctgttagtacgatcctggacctggtttttaaccattctgtgcctctgttttcttcatctgataaatagaaataataatagtacctatattgtagaaatattatgaagactgaaagagtcagtatacacaaagcaacttgaataatgtctgtcaagttataaacccccaataaactctagttattattcatttttattactgccatttaatgtttgcacccctgctttgcagataagacaggtgagtgtcagagaggtttagagtttccaagttaccaggtgcttgtatgtttttttccaagtgaagcaaataacgatattctgaggtaggtagttcaagtttgcatgaacagtctttggaaggtgagtgataatgagagatctaggagagccattaacttgaaacaactttaaactgatggaagcatacaccacgatgctcacatgagtctgcaaaatgccctcatggtcggccatttctagctcttctgtctcccaaagattattcactattgtttttgattattttcaaatgttcacaattaaaatacctcctaaaatctcaggaaggtgacaaatgaccattcagtagcactccatgaactgaagtttgtgattttagtatgtaattgtttttgctttgttttggttctgccttagaaaatcaaattccctgacactctcttggtttgggtggggaggtggttgggagttgtgattctgttgtatgctctgggtgtcagattgtatgggtggagcattcaggctcctgaagtgacaggtgagtgggaggccaaggcaggagtgggatgaagaatggagaaccccagttagagtttagacatgggctgccctggactgtggatattttcccaatcaccctttacactgatgttagggccaaggggttccccacctccatgcaaaatctgggttcatttgctaatggtttaacataattaggttgttgacaaattccttctaaaaattatctcatgttttcctatattaggagaaaattaatagcatttagttacagtcactacataatacacacaccctgattcttggaaagattcagatgggttcacactgcctttctgcaatttttattcactaattggtgagttcttgatttcttactctaattaattgctctcatattccactattgtagcaactgaagtaaagaaaatccactgtagtacacttgagctcttgtaaactaagataggtttaatagttttaaatctccttaaaatgtgaaaaccaagtactttaaatggtgcacttaaaaattccagcacaccaaaagagctcttaagatttttaaattaatagtcattcttcatgcaccaacccccaatcacttccaaagcaaagctctttggaaacatttaaaacacttcaaaaatgttaaaatgccatgttctttgaagaatgattagagattgtaagtgcttcagaattttttttcttttaatctaagtgtctccatttgaaagcttgtcaaagtgcaggcatgggaagggaataaaaacttaaagaagatcaaggtaggatgtcaaaacaaacttacagtttcccaagatggatttatgaagcaaagctgtcagtctggctgtcatggagcttcagaacagcacaagttttcagttttttacctaattgttcacagtggaattgcaaacttttttatgacctttcagaaaccaagtctggagttgtgacatttaagttactcttctcctcctctaattacatagattctagctttaaatagataataatgagactttttccacattggaaacacattttcctacgttttggaaggaagcatattactgaagtatgaatgtacaagcacattctcttgaggcctgggctgcctaccagatgcccaacacacatttctggaggcagatgatgcgattgtatcctccttaccgaaagcacttgaatgacacctgtgcggcaacctcagctgtttcttgttaatagcaatgtggttgagaaataagagtatgacatctgtttcttaccacattggcctagctatactgtcactattgttcccccatcttgatcttcaaagcagggtttctgaactttagctccatcagaatcacccaaaggactggttaaatcccagattgcaacacccacccccagagtttctgagcccataggtctgggatggggcctgagaatttgcatttctgacaagttcccagttgatgccaatgctccttgcctgggaaccacacttcaaaaacaactgctctggagaaataaaatgtacttttgttttgttataataattttaggtggtctggcttgatgttttctggatgcaaggctattcctgctattgtcacattccttgcctacatcctggagtgttttttgatccaatgcaagacaccccatgtttctaccacttcctcttctttgtctttatttttattactgcactaacacatcgtggatattctcttccttcttgtaattttggaagctttaggttattctactgaacactgaccccctgaatctggaaatattttcttgaattatataattcagaaataaaacctttatgatttgtggtccttgtaaaagaaaaattgcaccagatggtacaggcaaaagagaatgtattcattattattgcaacagggatcaagactatgatctctctttttagagagagaactgagctccactgaatcgaaaagcaggagactcttcaagcactggggtgagctagtggcaaaattttggaggacattatagaggaaattgggtgatgtgattaggctccatgtgcttgctaattggtgctgtggaagttaggctcctatcctcccacagaaattgagagataggggctctatttttcatgatgattagatttcaaagggatggctcccaggtacctaagaaagagcttcctggattgtaaaagtggcaagaggctaggagatttacatctcaaaggagcataaatgttctaagtatagggaggtgaggagcctctagtctggaagaaaccagtgaaaagtttggtcaagctgaggggaacattaaggtcatcttccttaccattgctcaccatttagtctggtaccttatattttacaaaagggtatgttgaggtctaaagtagtcacttcctgaagaaaacacagctagtaagtggcagaactagaattaaaacccagtatccttcctccttgggaagtatccttcctccctgggaatgttccctctgctccaagggaatctgcctatgtccttccccttctgccctgtcctttcctggcttttcattttgttttgacttgtgatctctttttctatcttttgtcatgtttcccattttcttttttctgcttttctcttgagggttcacctgagtccctcacctagccacttggatgtcttcttttttctcctccctgtggctaccccctagggttcagcttcagtttctgagctttccactgtgagtagcatggaattttaatctagtatctcctagaacttggcacaggcttggtcagggccctggccccggtctgtgccttgcttaaatgataagaagatgaacatgacctacaggcttagagagccatctgtggagtcaagttgcctgggtttgagcttggattctgccacaaactgagctttgggaaatttaacatatctgaagatcagttctcatcttcaaaatgaggctgctgtaaaagttagattagacaattcttatagagaaactagcacagtgattgtcacatatgcatactgtataaatatttgtcatggttatcattaaacctctgaagaaagggaatcagaaatacttttaactctcagccattctaaatctcaaaagttctcaaatatcaatttcattttttaaaaaatctttgaacacttccagtcccttgccttttactagcatttgtgttttatcacaaactttagcaacactggctgtgtgtggaatatggctctccctggccttggtgattgatgtttacatgctggtcaaagccagtcagaagggccagttagtaaatcctggccatatgttgattgctgagccatccttttgaagaggtttgactttattttcatctttgcatgtgcagagaatttaagccaaatttaggtttccttccttcctttaacctgtggaatcaaatcatttacattgtcttctcatttctcctattgatgctgctttttttttccctcaggtaagggaagggtataatgttgtaaatcagtgattaatggccatccttctaaaaccaaaattaaattactctttggattggattgtgacacttcagtctgtctgcatcaacccatccctcctaacacacacactcatgccatcactggcttatagctcaaatctgagttaggacgtgctcccttggccccaactctttttcagtgcctagcccctcagtctggagatgagctgaatcatgtttgcataacattaaataccttggtacaggaggttttgttgttgaattgtttacattgttgctgttgactctagtgtcaaatgtgtaacgtagcatcaaattatacacagcaggtccataaacacacactacagtctgcattgggaatatgaccacagagtcataatttcagtgatatagtctcaaaactattattagcattttcaatattctttttacattttttattttttctccccatgccttattcgtagccccatgagcattctaaaccacttagatggagcatcctgaattgacataaaactatcactattaataatcaagtcatggggaaagcaagagaagatgcccaactgagaacacttgtgacaggccatggtatatgcatacgtacaatttcaagtggcaatgtggggtcgtgattaaagcttgagctatagatcagtctgcacagaccaaattccagctctgccattatctagctatatctagctgacctgaattacctaacttccttttacttcagttttcctatctgtagaggcagtattagtcatcatttaagtgtttattcaagtgcttacgcatactaagttgtcaataaatattatcattcttctaaagattatcatgctctccaattgcccctcttctctgcacttacatgttatgttcctatcacttattttaaaagaactccagtttaatttaagggcatattgtagaatcttgaaaagagtgttagtgatggattatatattttgactttaataatacataagaatgcatttttaataacataatcaatagtgtaggctgatgatttaatcaacctcgtgtactacattcttgcaacctgtgatattacacaagtaatctattagtttgaatttgcagtaatataaattttacttagtgtgttttctcttggcttctctggttaatacctagtacccagaagagctgtggttaagggtactggggttgcttgtctcttgctgtagtgaaatgccagtgagtgcccaatggatatattgggatatgtttctatttttatccataaatggtgggacagaagagattgttagattcaccttaggggcttctgcacactgttcctgttacctgtgtgtttgaaaaattcagaatccataaacatcacgattattttactattctgtgtcatttaaaggatactcagtcattataaggccaagccctctttggtccacctcttagctatattgataagacttcttcaaatatgtaaaattcaatgcagtaccataaacacttaaatatattacattaataataataataataataataataataataataatgcccaccatctatttgattccttgcctttttttttttttttttttttttgacggagtctgactctgtcgcccaggctggagtgcagtggtgcaatctcggctcactgcaacctccacctcccaggttcaagcgattctcctgcgtcagcctcctgagtagatgggactacaggcacgtgccaccacgcccagctaattttctgtatttttagtagagatggggtttcaccatattggccaggctggtctcaatctcctgaccttgtgatccacctgccttggcctcccaaagtgctgggattacaggcgtgaaccactgtgcccagcccatccttttttttttttttttaaatccttaatatctaaagtttcaactttacacacaaaaataataacattcaatggtttaaagttgcctctggtcagatggttagaaaaagtcagtgtcctgattcatctttgtctccctgacactcaatcacattctgctaaaccatgccactccttaaaagggatcctatttgattttgaaatgtgtttgctcatatacactatgatcccaggtcttctactcacacatgaaggtaaaagattatttatgactaggccccttcagacttcagctgtataggtgtcggagaaccagtacttcagaaccatgcacatgaacttcacatcatagggctcttccttaagctgcagtctctttaaccacaatccctgtcattttattcatatttttcagcttagtaagacatttccatggtactaactacttggggatataggagggatttttcaggtactgagttcagagctttagggtaccctttaccagtttatcaccctagtagtttgtgaaaaggctgagagaaagttctcattcttaattcctcttttcccagaaaattgacacacttgaaaaataagtagcaaatatttcaataaaatatgaggccaaaatatgagaggggcattagttaatctcatcctacagcatgcgtctcaaattctttaatgatgtgtcgcagaaaagtgagcatttagactcagattggtgctttctctcatctctgtgtgttcaatgatttgttgattgtatccctatgccaggttccgagtcttccagcagtgcaggctcctcaggatcgctgtcccgcacccatccacctctccagagcacacccctagtctcaggtgtggcagctggctctccaggctgtgtgccttatccagagaatggaatagggggccaggttgctcccagcagcaccagctacatcctccttccacttgaagctgcaacaggcatcccgcctggaagcatccttcttaatccacacacaggtgagttactacctgctttatcagggacacaaggctttcagatgtttgttcttatgtttgatcttatgaatttgctagcaagtattctgaaaattcctgaacaggaaagctagttgcatgaactgttatgaagcatttttgtttagaaagagcagatttacagcagtatctataactctatatttatatcttcatatcaatatctatattgatgtatagatatagatatttccagaagcatccacttttctgtcttttttcttttactatggtgtctctcatgcatgcttaagagctaagacgagagaaaatggtgtgatgagttgggatatactaattaaaactttgtgtttgtcaatctaaatccccagttagcttgtattatgtcaaaagtgtttttgcatccaaggatctttctggaattgaagtatcagttgagacatatagtgaccattaactctagaagttgctttttaaccttagaatttcagccagctcctatgaaaggaataagaaacagcagtggcgaagagaatacagagagaaaattattatgtattttagaaatgtcaggcttagactgattttggtggggtttagaaaattgttcattttatgattacggtttcttctgtgatgaatggccattggttctttaattttgcatttttctagtgggtcagttgacttccacattgatttcaaaagactgagggcactgagattctaacatcagccaatgaactcaggaacatctgccaatttgcaggggaaacttctcaacccggggcatttttgtctctggccccaaggccattccgcaatatctggagacattttgattattatgacctggggagaagagggctgctattgacacccagtaggtagagtacagaaatgctgctaaacatcccccaaggcctaggacagacttccacagcagaagattatccggaacaaaatgttggtggtaccatggttgagaatccccggcttagaaagcttgacattgactagtcacttcttaagatgtctttattagagactggcaataaatggagttgtcttgaaagagatctgaagtttggtttcgatccttccagactatttcttcaattagctaaactcaaaaatgcaaaactggataagtatctcataaaaattatctgactcaatcttctcacaaatgtaatgctactagtaattaggaaattcagagaaatatgagaactgtagtaaaatagttacttgaataattgccacattttcataaaacatatggcacattcccaagtcatggtgtttgattgagacatattgaaaatgccataagcttgagggaagaaaggcataatcattttattgaaaaccgtttgaaagcttcagattagatatttctaaggaggatttttagattgcttttattttatctggattattgtaagcactataaagaaaatcaaaagaacactaggatcatattctttactttgggcactaatcaaagtactgtctgactttgttggcttaaattctttcacttttaattgagatagagggcttgcagaaaagagaacattttaaccacttgttttgagtggtttgttttaagcaaaattacagagtgttttgaaaaagctcaacagagtatttttagggtacaatgcaggaatattatttgtaatgacagcatagttgtgcatgtgtatgtgtatattatcatctataatcttgtttatagaaaaaagaaacagaatgttgtttgatgccaagtcccaattctttttcattggaccgagtcatttagagctgttatcaaaatatctcttttgtaaaaggatcccagctaaggaaaaggatttaataacactgttgaacagcttctccatacatatttttctgatctgacaaatgctaaatttaaaatatcctaaaccaaaaggaaatgtatgcatatattgtatactatacaatgagatgcagggtgaattatgtttcttcttttctagaatatatttattttgtaaattgaaaaatatgcacatgtatgtgtatgtacatatatgcattatatataatgcatgttatatatatataggtctatctttagtatatgtatgtgtgtgatgtacgtgtatctacctatcaaatttcttatatgacttttactgttgaagctaaaggtttgcctcctctgggctggaactcatctttttctgtcattgctgtgaatctagaaactacacctctcaccctttttaaagtatctttctgccaagtacacaacagaaatacttgggtgttaggaaccaagattgtatgactattttgcttctcatttgaactgcccttgggctcatttcctttttacaaccatacttagaagctgttgtgcagaggagccatacttagttattttattttatttgttgcttctccagaatggataaaaaagtcttaggcactgtactggtgctcaataattacatcattattgaaggaatatctactacccattatatatgtgggatggataatggagcagtttttcagctaatgtcatatatttggaatgtcgttcatgtgcaaaattataattgataaaacatctgttttaagcaagaataagacaagtaatgatttaaaaatactaaggtatctgccaatcatgtgcctactaaatgaaaaaaaaatgaaacttcctttgtcagcacaattgacttggctcttactaagtactaaatatttggcacactgaaatcaacctactcacatatacccttgcagtttccccaatataaccataacttttaattttgtctggcctcagactcagctttcaacaggtccatttctaacttaggacctcttgcctgttctttctttgcttttcaggcatctggatgagtgaggtgtcacggaggctgtttttcaaagttgtccctgtataacattttcattcttccaaggcaagcctggaatcttgggtttgatcttcctctggttgtcttggacctagcctccttttggaaatttttagcagaaagctcagctttgttgggctattttacttcaactcagtgcaatccagaaatgtcaacaggcattggcatccctcaaaaacttgttaatgttcatatatgttattttgatatttttcttggccattatctggtgcaagttcaagactgtgttatataaagtcatgccatttgcagtgacttcactttgaggagccttttagagctgttctctttcaaatgcttctgatggacttccataattctatatttttatttttatcaggacttctagcatctattaatccaaactgcttacactttttttttattaaatgaatcatgaattttgtgttctgtctataaatgtatctttgcaaggtctaagttaatccttgtctatccataatcagtagctcccttataatttaactatcatcttctaaagactaggaaaagaaaatctctttctctcaccccttctctctctttttaaataattacctttcttgacagaagggtaaattcagaaatgctttggtgttcaaaaccaagagcgcatgattacttcacttcttgtgtgaattgccctttagttcatttctttgtgaggagggtccatgcttattttttatttgcttttttttttttcctttcctgaaattgatggcaaggtcttaggcactgtgcaggtgctcaataattacattattattgaaataatatctactacccattatgcatgttgatgtggatagtaaagcagtttttcacctaatgtcatatattggagagaaatgagcattctgcatttaatccttttctctgcgcctgctctgcattcaaagtgccccggcttatttctgtcattgcactctcttcacctatgccagcacccatgccaaggcctgctgagcgtgcttgtgcagtttctgacgtgaaaacctcctctaggctaactaggccgagggccagccagtccgtttttcctctttagtcttcggcagctgtcattcaaactaattgcttgtattcagtgtaattgcatctggattggtagaaatcatggaatatagagaggctgtcattgcctgaattgaaaaccaatcgtcacctatcccgggtctcttaggaaattgcttttgttctgttctctagcatccatcttcttttatgtttctcagttctttccatctccccttggtgagcataaaaatcaattttttgtactcccttctctttccagaagaacctgccatctctctctacttaagcgaatccttagtgctttttctgtgcaattatttagaaacatctccttcttctagcccacagcatattaatcatatttcaaatggaggacctagaatttatcaaaagacacatgaatattttgggattatattttaaaattctagttatgatcagtttttcatacttccttagttttcattggggtaaatcaaaagccatacagaaatatagtaaaaatcctttctttttcctttccattgtgcatgtacatgtgtatgtgcgtatgtgtgtgtggctgtgtgtgtgcacagcatgagacttattttgaaataattccagatggagtcgtatgcctgtctctctgattttttaacaaaagttaagtacttacaatttttatcttgtctttttaaaatatagaacaaatgaaacacaagaaaattaaagattagaacactaaatggacttacacattttttaatattgagcttttaaaaatcattttccaaattgctgatttgggaggaaaaatgggttgcagttttgaagctagaagaaagttatttttcaaaaagaatattcatttaaaacaataaaatgcatctacgtgataggaaaacaagtgcctggaaaatgaagaacatagaaaaaagagagagcaagaccaaacagttgattttgtcactgttttgcaaatataattctggcacatttgcttccccatcacagcacattattgttggttatgaaacagatcagaatttagatatgtttctgaatatgcaacattcaaagtttcttgttactaacacacaaatatatttgcactcaaaatttgtggtaataatgggaaatactaacctctggttgccattcgtaagtgagctgaagttaaggcttttgctctctacgagtgagcatgttgtttggccttactacaatctcagcattttcctccccaacctgctccattttactttcctaatttattgagctatacaatatataggcgaagtgcatgacctgcacacatctgaagtccagaccttaataaatttttgcgtatatgaaaatcagtgtgacttcactcagaatgagacctagagtatatctagtcttcctatcagtttcctcaggctctcccagaagtactgatttcctttatttagaatattcacttagctaattagcttagttcccatgttataacagtctgttcttgtatgaatatcgtatgtactttttttcactagaatgtctcgttttctctgggtcagtttttaaattctttacctgtctgtcttccttttttatttttctttttaagacagggtctcactctgtcacccaggctggagtgcagtggcacaatcttagctcacaacaacctctctcctgggatccagtgatcctcccacctcagcctcctgtggaaccacaggtgtgcaccaccatgtccagctaattttttgtattttttttagagacagagttttgcccggttgcccaggctggtcttgaacttctgagctcaagcaatctacccaccttgacctcccaaagtgctaggattataggcatgagccaccatgcctgtcccttgctcccttttgttgcaaatttttctcatatgactgatgatccttggttgttctttatttatattgttgaagaataaggctgttgttctttcctctgccatcacacgcttcttaccctggataagaatgctcatgcaagccttatgtatcagaacaatgtatggactgagatgctttagaacatgtgctagggcagagctcagcatgctgcctccaccatctcccttatgccaagataaggaggactttccactgaaatatcaaccccatcctgggagccccattctctctaagtattttgctcaggttcctagagaatatttctgtgacttcaacttgtgaacaaatattcccactgctccttttccaatagggttacaggatttactgaaaagggaagaaaagactcacaagtagttcaatgaacagtttgcctatccattccctcatgttctgatgcttctcattatttatctgccaatactgggtgttacttcaccttgaaacatgtccttcacctcacctgacttctcattcattgattaataattttcagttacgacacattttttttcatcgttacccagttgttccatgtactcattatgtaaaattggataattcacttcagttatttggcataatggaaagtgaatagactttgaagtcttactgaccagggtcattttctagttctctcacttactgtttttttatatttctgaataggttgcttggtccccctgactcctaatttctttagagtggaaatgagaatatacctctgcaggttgttaggagagctaagatcatacatgtaaggtgcctgttactgtgcttgccacatagaaaatcggtttgttctctcctttatgcccccacacccgctccttgactgcactttgctcttctcctttcagctttttattcccataatttttccaggaatggagcttcattttctcttctgaaaaacagagaaatgatacctttcttcctcacaggaattgtgatgaggctcaaatgatgctattttgtaaactataaaatactcctcaaagacaaagcaatactatgacgaatagcagtattaataatagtaaaccatgccattatttcataaggcaaaagaatatatattagcttttccattacaagatgattctgtgatgtactacttttaaaatctaaaaccccgggtatccttgcttatgtctatttcgagaaatgagtgaatggatatgttatgttccattgtatatttattggaagaactgataatgattctgaattggtgacaaggcttagtagcagcaaaataaatgtattggtaaataacttgtgactgaatgtagctggaggtgtgtaactggaaagcagccgttatccttcagtgtatgttatctcactaatggctgtgaggtgcagtgcagcaaaacatctagctttgtgaagattgcttctccacaggtctctctactgggtacctccgtccacagatacatttagctttggcaaagctccctgaagggggtcgatttatttgctgcttcttaaattgctatgggctcccactgtcacctagcttaagcgatgggtcacaaacagtaaggtcttcacattggtgaaggttttggggtcttagatttccactgccctgcccctttactttaggttactttttgagtatctaacagagtggttcttcatgtcaaaggagagattgagaagcttacctggactaagttctgattccattgcaggccagccctttgtgaatcccgatggaactcctgcaatatacaacccacccaccagtcagcagcccctgcgaagcgccatggtggggcagtcccaacagcagccaccacagcagcagccctccccgcagccccaacagcaggtccagccaccgcagccacagatggcaggccctctggtcactcaggtagggggctggttggaaggcagggaagggaagtaccctgagatgaaggctacatagtcctcagagcagcagagaatcagggagaagcgtatattttacactcaagcctcacaaataaaacctggcagcatagagttctttgcagattgacaggattttatctgaatccttaagtttagatagaggtgagtgccccatgcagtaacttgcaagttgaaggcatgaaagtagggagaataaatgattttttcttaggtctaaatgccctttttttaaatgtatggaggaggctctctcagagactgaactctaggtctttgcgtcaccttcctcccccattcccgtcacagatcaaatgctcatgtctgcaaagagtcaatactgaattcttcatcaatgggaagaacagaaatcagtcaattccagggaggactggctgttcctacatactcctcttagagagatgcggagctgccctcctttgctgggaagacacagatgcgtccatagaaacctgaagtgtttctggtaggctgctagagtgaaactcattttaaattcttgatattacttatttgttttggggcagtattttcagacccagaggatctaaccaacaatatcaaacgtacatcagtaacttcttaaagaaataatcactaagtgcaaatgagcctctctcaaatgtgtctggctctggtctttcagagccttgactttcctttggtggctagttcccctctctggagtgcactgaacctagagagcctatgaaggacagtggtgtgcatcttgtgagatttcaaccccagtgcttttctgtcagctgatcaattttttctttcctccagtctgtccaggggctgcaggcttcctcccagtcagtgcaatatccagcagtctcttttcctccccagcacctcctacctgtgtctccaacgcagcactttcccatggtactgtattatgtgtatatgactttttcccctaggaaagcatattctctgattttactacttttttgtgtgccactggctgacactggggtgggtgccctgggctgactgtgagggggtatgtgcgaatgtctcatttctgaacattacagcccatctctgcaaaacaatggtttcctttctgtcatctgtctgtcccatgctgagtgcttctgtggtctgttacccttttcagagtataccagcaaagaaggaactgaatgccttcagagttagaaatcaggaacagagagatacaggaactttgcatgagggttcgggaaagatctcaaggatggtgttgggatgggaaccattatcaccctatgctcctgatgtaggtgcccccgcaattccaatctcccaattttctttcatttttccctcaagtcaccaggtcattttgagcaacagcttaaaggatgaacattgctcctaaattttagatcaggccagtgaataaatactccctcatatagtaatataatcccacccagcctgttggtgatactggtcctggctccatctttgcaacagcactggggatgatgagtatagttggttctgccttatgggtgttctcgagaggcaaattctgtggtttctgctgggaagacaagctgacccttcaggacagaacatcaagccttccttgtgtgcaacaccaccctgaggagcctgtgccttcagtggaaaaataatttgtttccattgaaagagaaatatttggatcaaaatttttgtcatctctgactctcttgggatgattaaaacctgatttgtcatgttgtgttctcttgttatgttctggctgaagaattattttattttattttttccaaattgtacttcctgtctctcccacaactccaagaatgtgtcctgtgtctgcctcagagtgcctctcttattaccaagctgatcctgtgaattccctcatttatttccatgacttgcagagagatgatgtggcaacacagtttggccagatgaccctgagccggcagtcctcgggggagactcctgaacccccatcaggtcctgtctacccatcctcccttatgccacagccggcccagcagcccagctatgtaatcgcctctacaggccagcagcttcctacaggaggattctcaggctctggccctcccatctcccagcaggtcctccagccccctccctcaccacagggatttgtgcaacagcctccgcctgcacaggtaggtgtgcttcctcatgcctgtgacctacagctgatttctgatgcattttgacctttatctttctatgtagaaaataaccagattcactccctcttccctttctagtctatattaatattcctcaccaacaggaagtagtatattttttcatgcatcagttgttcaaagttatagggctcagaaagtgagttgaatgaaactgatccaactgcccatgaaaacaacaggggaatatcccattttccaggctgctggtacagagaccataagaaagcattccctcccatgtgatatccagctcaggggattgcctaggaaggaaaagccttggggaagggaaaggtctgcacctaggagactttcaatactctcttgctgctgccccaaaaatgcattctttcctttcttatcaattctcaagcattttctggggctaatctgctgctccaggcaggagctcctctatgaatataaaggaggaaggtaagctgatatccacagtccttttctctccctaaggggaagcagagctcacacatctctcacaggtagccattaatcatatttaattgacttgagcatgtaagacaccacagatcactgatttttactgtcttctcaaagactgattatgtgttactgttcaccaccaaacatctctggtactctcttgggtatcccttgcagaagattagaagtgattactgtcaagatataaaatgcacagaggcattttctggtccattttcaaggcacaccgatcccaagaaaattccatcctaattatgaagtattgcattggatgagctgtttaaagtgcagtgtcaccttcgtatcatttgtttcactgccttaacatcttgaataaattattttcttttcaagccacacaaaaccctctaccaagaaataattgtcactaaattgttcattttattttgagtgattaattaatagttcatcttcagttgccttctctgtaatatctcttcagaagtgggatcttaaaagatgtgtaaaataagtttaagttacaggagaaagggcttcattaaagtattaatacttttaccaataaattaataacttcaagcttaattattgggaaaaataatttagctcttttggcctaaaaagcgtttaagtgtccttactaatttctgctgtcaaacaaaatgtaagcagaatgtttaattaaagatctttaaaataaataaataaataaatgaaaaattagccaggcttagtggctcagacctttaacccctgcactttggggggctgaggcaaaaggactacttgagcctgggagttcgagaccagcctgcacaatatagggagacttcatctctgcaaagaattaaaaaaaaaaatagctgggtgtggtggcacattcttgtggtcctacctatttgggaggctgaggtgggagaatcgcttgagcctgggatgtcaaggctgcagtgagccatgatgatatctctacactccagcctaggaaacaatgcaagaccctatctcagaaaatgaaataaatgagtaaataagtagataaatattttaataggaaagtctttcttcactgaaggaatttcaatattaatccactgcagaaacaaaagcaattcataacccctcttgtgtctgtgacagaaatactttcattccttctttaacagatttttaaaaagatagaaagagagggagataaaacaggtgtccatggttcataatcagtctagacatttatgaacttctttttgaagaatcacagataaaggtataggctataacccatagtaactttcaatttagtaaacattttaaaatctgattacccaactatggaacaatggaaataacttagttcagattcagcccacaaatatgtggaaatatgttaaatttctgcagaaaatgaatctatttaataaatgtaaaggtcgatttcatctgactcatcatgtatgcttcctaaatgcccactggaaaggtgaagtgaaaagcacatggacgagacaaagagggatttgaagaagggaaatgggagaagtgcatattttttatagtttcttctttcttttctcttctaatccactcctttttggattctccatattttaacatgattggctgaaaatatacatttctgagctttggggctattcttactcctttctcccttcacctctctcctttcaaacctttcatactgatcttttaaaagattgctgttaacctggctttctttccatcctctctaagagaggatgaggttagaccaagatctcatttgcttcatccggttggggatcatagttcctaagagctaaccaaagcgccaccttggagtggcgctggattcaagtagccaaatctctagcacagcttgtgaaggtatcacagaagctatgtctggggaaaagaaaaaaaacaaaacaaacaacaacaaaaattgagtttaaaatttttttccatgcagctgtacttttattgtaaccattagtccgcatcagaacatttttaagtataaattccttcatccctgaggatattttatgttttatattgaacataagaagggagatcaaggaatagatatcacattcatgagcttacatttaagcaagacagtcttttctaaaggaacaaaacgctatttcctaaaagacatgtaaatataaatgctgacaaataaattagatgaaagttgttcctatttttaatattgggaggcatctgatgcataatggtagtcatctttaataccaccaaagtttgccagagcatagctaaatgctattattactccagaattatttgttttttattgttataaactgcctgacaaaaaagagagaagtagtaagagcgaatcactataagcaaggtatacaatgacttagttgccagatactgacccaagattgctttagactcattcagcctcttgcccttgaatatccatatgttatgtagccacagttataattcatcatgattccatgaaattgcagagctacaggttcacacagattaagttatattttgttcccactttatcctcaggcagcaaaatatgttacatatgtttcaacagcaatattgaaatagaaaagtgtttcctattagacctgagcaaatcagaaaacaaaataaccatgaaaatcacagttctcaaataattgacttgtaattttatcctatgtatataatgtttgtaggcggtctactagggtacttcagttgttattttagagaatatgataggcgaaaactcagaagcccagagatagaaaataattaactaagatcagtaagaaagtgaccttaatataaatgaactgaggcaggcaaagaagtctatcagatcaggaaacatttgatttggatcataatcaaataatcagaataattttattcattctcagtcataagaaagttaagaaggtagcataaacaacatttttatcatattttcccttttagattgaacatacttttttgaatagtggtgtgtaccaatcattctgcaatgtgctttgatagactaccatatttcatgattgcattctctgctccttttaggctacagatcagcagttttcatgtttcacccctgtttccattagaaaagcaattcaagttagatataatatttaaaatgtaggttttcgttgttgatgataactgtttcactctctcttgtttcatctaaaaaacacaaaagtcttgttttaaaacaaccattgtatgatcacgactaggtcagcaattgagcaggatttatcacagatggctcatctctgctccatatggctggggtggcttgactagggctacacttacatgcctggaactggagggtaaccagtcaattgggggtacctgtgttccccacatggcctttttctgcagcagaatagtctagacttctttatctcttggctgggttccccgcctacagacgtggaagctgcaagtcttctttaggatcagacttgaaagactcagacatcatttctgcctcatggcgttggtaaaagaaagtcacagaaccagctcagatttaagtttgggaaatggattttgcctctttacgggagaagtagcatgcacatacacataggcatgggagaagtttgcggtggccatcttcacaacctaccacaattataagacgaaagcatattttaagtttaaaaatttacattatctacattttcattctctgctttcttcctcctttcttccacagatgcctgtatattattacccatctggtcagtaccctacctcaaccacgcaacagtaccggcccatggccccggttcagtacaacgctcagaggagtcaacagatgccacaggcagcacagcaagcaggtacttggaatctgtttcccatttgcttctcaacccagttatttttgctggtgaatcttgtactctttggatgagtgtccaagcttggcaatttaaaccagcacattttctctacccagagaagataacaaagcatttgattgactctgtgtggaaaagtagtaggtacaagaaggtgaagcatatgtcagactagcatccctggcatgcatgttaaacagtctccataaattattttttgatccttcttctgttaaagcagaaagtcaaccatgtccgtacctttctagttcataccttcttttaattttttttttcttttcaatttgaagagagtgcttcctctgttcttaaggctagggaaccaaattaggttgtttcaatatcgtgctaaaagatactgcctttagaagaaggctattgacaatccagcgtgtctcggtggaactctgactccatggttcactttcatgatggccacatgcctcctgcccagagcccggcagccactgtgcagtgggaaggggggccgatacactgtacgagagtgagtagcaggtctcacagtgaaccggtctctttccctactgtgtcacactcctaatggaatgccgttatccaaagagcagcacgaacccgacagggctgagtggcttgtgctagggagaggtttgtgtcattcctgctgaccaaactgcaggaaaaactgctaattgtcatgctgaagactgcctgacggggagactctgccttctgtaagtaggtcatgtaaagagcacgtgctccttgctgctactcatagatgcctgctccgtgatctgatttctgcactgaatctatgttatgcatatggaatgtatacagatacatgtatgtaatatatacacaatatgtaccatttttataacctatgagaaaagtgcagttcttgccaaggattagcaccaatcacagacatcctaagaataccaatgctgacactgctagcatcctgtcagattggagaaagaattaaattcccccgtattgtggatggttacatgttctttggtttatctcatggcctatttaaagtctgtgggagaagaattagagaaacctatatcttccagccagattttgtcttgtttcagcactgtattagtttggggaagaatatatttgacctctgaattgactttagacttttacagtgttttgagaacactaaagggtttcaaataactatttatttttaaaaaatcacttggcaatattttctctaatttgtggaaaacgttattacctttatcattttggtggtaacggtgctatcagtttagatacatgctgtagaaatgtgttgcttgcattctggactatcttattttatgctaacgttaattaaagggttaatttacaatcttgaggatcttggtttagaggctatgtgcaagttttctacttggttactaatgcctttagaagaaaaaagatgcagatatctaattataatgatttttattaggtttggtgccattgtgtggcaatttttaaagagattatttcagtcttgtggtagagtgtcatcatacaaagaaacgcagttacaaaacatgctgcaatccactaaacccataaactctagatctatgtgaggggatgagaaagttagatgaatatgataactgggcaacagaattagatttcaaaaaagtttaggcctcccccactgacttctccattgctttttctcctcttcactaactttgttagtggatgtcaaaacaagagacaatatatgaggcattttttactctttaataaagcacaatgggagaatttagggatgtggaaacaccctctcccattcagttagagacctcactggctccacctacattccatggcaacctggtagctttggtttgtcacattctcccacatcaccgcaaaaatgaccctcccaaggtaagataatgacactgtaatgagaagagtgcactctagagcagcatcaagctaaatatagaagcaaggcagtgcctagggtgtcaaggaagtgagtgccagttaatgtggcctgtacagggtgaggaagtgagaaaagtgaaatgatcataaacagtattgtccccagaaatgatggcattagtatacacatgcacactgagacctttgggctcttagtttttgtgaccaccacactggatacctggcctaaaatcccaacacagtttccaccacagtgatgaatgtacctagtatttgggaaagcagatggtgttccctgaccttacagagaatcacttctgctaataaaatccaagtaaccagaccacacagtggctctttgagagtgcacagaggctctgggtcctacagctgggcgtccttttgttgagcctagggagactaacagaaactttccaaatggtcatggcagtcatttgtgagagcaactctatgtggatggactatctcatagaggaaagagcctcttcagataactgtataagttatattttctggaagaactagaaaataagacttctccatctttaagtcaaactatgggctactatcagcatgtcaccctcccacagtcatgttttaacttgttcttcctcctgcctcctgcagctgtgtgtcttgggatctgacccttttccatcttcatctgataatgacaccagattatgtcataacatcctcagctatcacgtggttaaaattagagtgagacagaattatgtcagttaaagtcaaatgagattttaatctgaatttgcttcttggcgctgttcttaatctttatttaattgcagtaaaaagcctctcttccttctcctacattcttgccagaattgaaatctctgtcagttactacatctttcctaagacttaaaactctacacagtgaatttttgtaaagtgaactggacactatactgttgattaaataggacacctgagttcccctgtggcacagtagggagacataagttctttatcctggtgattttgtactcttcatccgatcagcacatggtaaaaggtcctaaacatgtggaagaggaagcctatgttggtggtaattataaataaagaacactaatgttggggccaggtgtggtggctcacacctataatcccagcactttgggaggtggaggcaggtggatcacctgaggtcaggagctcgagaccagcctgaccaacagggtgaaaccccgtctctactaaaaaatatataaaaattagctgggcatggtggcgggtgcctgtaatcccagctacttggggaggctgaggcaggagaatcgcttgaacctgggaggtggaggtggcagtgagtcgagattgcaccattgcactccaaatccagcctgggcaacagagcaagactccatctaaaaaaaaaaaaaaaaaaagaacactaatgtcgagaaagtttagagaaatcaaatggtggagttgcaaaatgatatttggaatttgtagctacatttgtgagaaaaataaaaaaccttcaatttacaaatatctccaacagaagaatccgtttattgccaatctggcattatcaggtacctccaatagtggggagatggttttctttctgagggaattattgatagcccaagtctgtgtggaagagcagttatcaggataggtgcacggcctcattagccaggcatggtggtacttgccagtagtcccagcaacttggaggagtacaaaatcacgaggataaagaacttatgtctccctactctgcctcaggggaactcagatttcctatttaatcaatagtatagtgtccagttcactttataaaaattcattgtgtagagttttaagtcctgaggtgagaggattgcttgagcctgggaggttgagactgcagtgagccatgatcatgccattgcactccagcctaggtgacagagcgaggccctgtgaaaaaagaaaaagaaagaaggaggaaagaaagaaagaaaaagaaagaaagaaagagagagagagagagggagggaaggaggaaggaagaaaggaaggaaggaaaagaaagaaagacagaaagagaaaggagagagagaaagaaaaggaagaaggaaggaagaaagaaagaaagaaagaaagaaagagaaagaaagaaagaaagaagaaagaaagaaagaaaagaaagaaagggagaaaggagagagagaaagaacagaacagaaaagaaaagaaagaaagaaagaaagagagagagagggagggaggaaggaataaaggaaggaaggaaggaaaagaaagaaagaaagagaaaggagagagagaaagaaagaaaaggaggaaggaaggaaggaagaaagaaagaaagaaagaaaaagaaagaaagaaagaaaagaaagggagaaaggagagagagaaagaaaaggaaagaaagaaagaaaaagaaaagaaagggagaaaggagagagaaagaaaagagaaagaaagagaaagaaagaaagaaaagaaagaaaaagaaagagagagagggagagagggagggaaggaaggaagaaaggaaggaaggaaagaaagaggaaagaaaagcagttatcagcttatggcttgtttataaaaagactgtaattttaaaatcattctatctttggaagacttggaagtgagaatatcttaactggaaacagagtttctcaaccttcagatattgaaatgaagtgttgatgaacaaacatttcattccttaatgttttaagtttattttagtagttagctctcatgccatttttttagttagtacctgtgttgctatggttttgttcttgttgagaaacatatttaaggccacaaaaatattagcaattatcacatctcccattgactcgggatctctagtgggctagtttaatcactaccacaagtttgcaagggaaatacaccgttccttctttacagataggtgaaactattgctcagggaggtgaaataaattatcctgggtctcaaggttaactgtgtagggaaaagcacccagacgtgactggttttaagcccatgtgttaagcattttattggaacaacttaaacatggttactagttttgcctttatatgctaacatggatgattgcataaaaactggcatgtgagaaataaaccagcatgcccatgttatagaggcaggtaatatttagttaattgttcaagtacacaggttgacctaaaagcagaaaatataagagccttggtcttctgcctccctactgagcttggggttccatatcactttgtagagatgatcaataacaacaaatggcagaaagcagctgagacatttacattcaaatcacacactagaaaggaaaagaaaacaaaaaagagttccttttaaatggtttccaactccaaatttcctatgaagtttgacttaaaaagaaatatacttagcttcattctcggctctccaaaatcttggtcattcctaaaagcaaaaaaaaaaaaaaaaaaaggaacttataaaatcctatgtgtgttctatgtgtgttcttaaatgggaattgggggaagaagtttggtttagtgtcagagtaacactagcctcataaaatgaatgggaaagtgttccttccctttctatttttggaaagagattgtataaaattggtactaaatcttctttaaatgtttgttagaattctccaataaatccatttgaccctagagattttcagaaacatttttttaactttgtattttaagataatttctggagattttaaattgtgagttaattttttatgattatagtattcagattatatatttaatctttgcttagtttgggtagtttgtgatcattaaggtcttcgcccatttcttccaagtggctgaatttaagagtataaaattgatagttttatttctttactatctttttgtagcttcaggatatgttgtgatatcctgtttcattcctggtatagatgatttttaacttctctctttttatttttgtcagccttgctagatttatcaattttattgaccttttccaagaactagctctgtttcattgatttttctatattgttttagcttcaatttcactgattactgacttatctttattactttattattttcttccttctgttaattttaggtttatttcgcttttttttttttttttggtggtttcttgagataagaagttagatttttaatttgagatttttttctcttttttaatgtaaatatttaatgctataaatttccctttcagtcttgctttagctgtgtcccacagattttgatatgctgtattttcgttttcattcatttgtatatatttttaaattttctctgagaccttatctttggcccgtggattatttagtggtgtgttgcttaatgccccagtgtttagagattttccttttgtcttcctgttactgattcttgattgattctgtgatagttaaataacatattctgtatgatttcagttcttataaaatttttgaggtggttttacgacccaggaaatagcctatttagttgaatgtcccataagcacttgaaaacactgggtattctgtggttgttgggtgggatggtctatatatatcagccaaatcaggttggtttattttgttgttcaggtattccgtattttttctgtttttatgtttacagttccatcagttgctgagaggtggatattcacaaccccaccataagactttctaaagccctggaatgaatttcaaggcaaaagttgcctccagtgtccctgacatgcaaagacagaggagggacttggtttttcagaccatgctatcttttagttccttttgcaattgaataagaaatgttttatcacctaaaaaaaagttaacatttcataaaaatagtctggaaggtgaaagtcctgtgaacagtgattgggctttgggtgagctgttcctataagcttctgcccgcatctctcacttgccaggctttcagccctgttgcttaatgccagtaatactactttaggtttaggtagaggagtgatgaagttgaccgtttacaaaggacagttcaacaatctgccttcctaatagaccaggagggtctatattcttgaatgccgtgaagatagaacaatacgaaatcaagacagctacatagcagagtaaagagggtaaaaaagagcatgagggaaccttaagttaaattaaattataactgcagcaaatcatttgatatggattctgaaactgtagggatgtgtctcacctctgctttataaaatcccttttctcttctaccctcccctactcccaactatctgctgaatgattcattttgggtaaaaagcagtttcatagagcattttccattaaaatgttttacttttgaaattacagttcagaaggaggccatgaaaaagaaatcctaaaaatgcatagtattgcaaaacccatgcagcttttatggggctttcttatggtgatttaatgtacctctgttctgcgtgagtaagtaagcgatactccaatctgccttgcagtagtagaattggaatttctcacggaagacaatagtggaagtctttggaattttttggaatgtctttactcactcttttcacttacatttaagataaacctcactttggactatcccttacagtctgctcaacagccagaatgagatatgagtactatgaatataaatggagtttaaatacttaattttgctaaatgaggaaagtgaggctagaaggccagtctctggtccaatgcagtctctcttgtcagagccagagagggtcttctgctactttagcacctacagaattaatgacagatacagatttcagaaactcagcaagtttattcagtctgacaaagtctgacttgtcagagtctactctgcctatgtaaactcaaaaccatctaatacctgcaagttgtaaagagagcacacaaataagaggaaacagtatctcaataatttggaaatacgtcattacctatccccactcataagaaaagaactggagattctccaactgtcagagtatgatctttttcttcccagatagagaaggtggaaatgagcctttgcaacaggcctcttgtttgttgagctaattggggaagctaacgatggatgcagataaatcaggttgcaatgaactaaaaatacatgcaaataaaagatataggaaagaatggtgagggaagaggaaaccaggtcagggaatgtatatcctgtttgttttattttgctgactgatactatgataacagtatcaatcaggaatctgcagacagcactctgaccttttggatctagatgccattgaatcaatcctgtattctacatctgaggaaacgatgtatgtttaaagagttctttggtgaagaattgtgaagttggagggggtcagcctgtcagaaatacaaactttaaaataggccagtttttgtttccctctggaacaaaaattcaaaatgcctttcaactcttcagttatagttattcaattccctctagctcttctgtacacaaatcaactctaagcctctgaagattcgtaaaaacatcttgcaaatgctatccccaagccctctcatgggagatgagaaggttactataaccagggtcctagaactttaatgtgcatggaaacccagatcttgttaaaatgcatttcagtgcagaagctctggagtgtcttgagattctacatttttagcaaactcccaggtgatgctggcgctactggtctactgttttgaaagcaatgtaataaatagtacatttttattcattgccagctcatatacaagttgttgcaaagggagaggacctacccaaattcattattttatttcacattatttgtattaggcacaattctaatatttcatagtcaacatttctaatcttgtgaattacagctagtatttagaattaatatgctaatgtttacaaatccaaattttaagaaagcatatgaatataatgtgattctataacatagcagacactcataaatgcatgaataacatgtgtacctattttcactttggtatggcaggaagtgtgtgtgtgtgtgtgtgtgtgtgtgtgtgtgtaagtgagagagagagaaagagagaatattcattttagccagatctcttggtggtttatttttcccttgtggaaaatacggtgcttcaggtaaagttgttgtgtgaatatttaaaaggctaaaacagaaatctctcaaccatctaattcaaatataaataagagcaaaactgtggttaaatattatgaaatagaatagaatgacagcctaacaaatcaattcatgtcaacatatgaatatacacattttgtgtttcaaagttcaaacacccaaggaatatgtctcagaccttttgggaaattttcaaaggtataatatgtttcaattttggtacgcctagtgatttgggaatttcaacaaatttaaaataagaatacttccatgaaagctcatttcagttgttcggatggcagaaaataaccagactgtgaaaatgtatccctatcaccctttgctcctggcagctctttccttcaatcatttcagtttactcttgaatgaataatagtggaatggacttagtggcatggctggcaggaagatatgattatctgtggaacatgtatatttgaaaagagaccaaagccacaatttcttttctgatagttcttcatagaaattcaataaatagtaacgtgtttagtttttttgttccttcttttagaagtaatgtttctgatataatagcgagctgttagtattaacagctccaagtaagaaataaggttattgcctctttaatgttgttctgaaacacatttgggatggggcaaaatgtaccttaatggaatttacaaatttatttaaccaaagcagttgagtaagggttgacagtgaattcaatatttttagcttgactgattaatgtaattgtcaatgtaattgagaaggtttttttttttttttttcaaatatcgcttttctcattctttgtgcttctgctgttcttcaccttgatttttttgctccttggggttggctggagatggggagaaggagcatcagagctgaagaaagaatgtggaatactggtatgaccaataagatgcattaatttataaacagtaggatttttgtctttataccttaatttgccttctctaagagttgatgattctttaaaaagatgtattttcctaataagttacatacattttaatatttagagtccactattctttgtaatttttatttgaggaaataggtgtaactaataacactaagagaagcaatgcaaaagttgttacacttgacagctctgaggacatgatttatactttgggtgtctgcattattatatttccaaaagcagaggggtgagttattaaagagtgacacgaggacttaattgtctgatgtctattaacatcagtgggaggagtcacatggatgaatccttgtggaacatgctgttctgaaaatattagtttgaaaaaagtttctatggaaatgttcatgtgtttctttcattaattggtctaattattccatttacaaaaatgagaatgagaagtataacactgggattaagagaaaaattaacattattaagagaaataataagaatcatgctatttttagacctaaaaatcttacacattcccaaaaacggtatagatggccaggttctctctatcccctaggaggttacagtaaaaggaatttgttcagcacatttgcagtaattgctttagcactttgtattttatgtgatttttggtgtttaaatttacatttgttatgcagttaagaactactggtattattagaattttctgtaaagatggaaagtaagacaaattatagcattatctgttttctttactatacaaaagaaagtagaaagcagtcgtttggcgaaaacagaaagaaaaaggagatttggattaaagatggcaagaaaagaaaggtggcaagtaaagcatacacatatatgttattgaaagctctagcatttctttgcagtttttctaggagacaaactaaataaaaaacaaaataaccctaaaaatttcaaactgctttttccaagaatgtgatttacctgattatttaactgaatgaaatcttgactctcccttttacttttctcctccttttgtttcttgttaattttttgagagcaatttctgttctcagttgtcacctacatctatgaactaccctgtttttcagtcccacttttcttctgaagcacatttaaaacaaacaaacaaacaaaactttttcattgtctccaccaccttcccaaacctaagtctgttttctcattgtattttctatctttaactcttgactgtacacaagttccctgcaactctctttatactctttttttctttttatattaaataaaatttgcacttcaaactcaggatgctgctcatgttatgttttagttgtctgcatttttctcttcatcagttctttttctttctattctgcacatgtctctccattatgagataggacacttcattattccagagacagtctcaatctaacagccaaataatgaagaagaatttctgggattttctccttttctagtaaaagaccacaaagagtaccatgctatttcttgttcaccgtggtatccctagagccaatgtaaatttggccctcaggatttgtgacttcacgtagcaattagttgtgacaaaagagtgaagagcatcttaagtagtgttatttttatcttgctttccaaattcagagatgcagtggtacccatgggaaaactgcaaggcttttggatggtgtttaaatttttcatttccaagaactacacatttgggtaaaaactttagtggtattccaattttgaatagaaagcagtttgcaaattgctgaacttataagacactatctcagaagtaagtacccctgaaagacgctgctttttaaaactctttcttcattctactgtctttagacatgactgcttactacagggacacaaacgcaaattcagcaaaaccaatcagcatgggctcattttactcattacctcctagtttgtctattccccagaccaacagcataagatcacagttttaatcaccccctccagctctgaaataccaagagcgcttctgtccaaatgagtggcacataaatgtaatggttccacagcaacaatcactgtaacctaggaaggctacaatactgtctgaaactcatcgaattagtataattctaaaagaaacactgtaacttaggcactctgtttagagcttatgcgagtgacagtcttatgagtgggttcactagttggttcagtagttatagtatgattccatggctgaggcatatttgcacaaacgttctttgggagagtatgttaccaacgtgcagtagccttcacatttatgctcctgtccaaagccacgaaaccaccacagaccttccccatgctttcatttaggtgctattcacagttgtcagccaatccttcctggtggcagtgatagttttgatggctcttcagtgactcccaccaatccctaatcatgaggaagatgcttaatcatggggaagatgtcagccgacatcatgattcccacactgttttttacaggtacctagagacttgtaattctcccagatgctcttactgctttggggattgttttgttgttgttgttgttgttgtaataggtccagcacaattgcaccctttataagccactgtgtgtcatatttgttctgagaataaaaaataaatggcagaaagaaggtccagattaaaaccaaaagcacaccttgcagaatgcaggatattgcagtagaacacacattttgagtattgtaggaatatgcagtaaaatctgtcaagctagctccaagtaggtttgcattaatttttgtttcctaaggaaaacaacttataaacaaatatcactttcattactcatttatgcatgggcagtgttaagtagccagtggtgtggtattatgatacagagttcagagggtttgaagtgccttttagtgatttttttttttttttttgagacagggtctttctctgtcacccaggctagagtccactggcatgagaactgcagccttgaactgccgagctcaaataagcctcctaccttagcctgagtagctgggattacaagcacccgccaccacatctggctaattaaaaaaaaaaaaaattgtaaagatacggtcttgttatgttgcccaggctggtctcaaactgctgagttcaattgatccttccaccttggtctgccagaatgctggggttacaggagtgagccaccacacccagaccccttcaatgaatcttgatgaataattcaattttcccaagttaagacctagtaggtctacctgctagaaaaggctcagcttttgctgacctgggcctgtggaattgagatgagtcaaagagaacaatccaatgacaaaaaaataaatccgagaaaaaagctccagcctagctgaaaattgtagcaagaatcaggagaaagagaagacaatccaagtggtggtttttgttatgtttgttatgttttcttttatatgtagaatattttataaattgtgaaaacaatgcagtgcataaagaaggctttttgaaaagacctcaaaactttatgctaacacaacaatgaatttttagttttgactcttctctttctgcctttgagcctatgtatatatgcatgttgtagatttaaacatgtattgtgatcatagagtatcgcaatttcttatttatttggtattatatttattcaaaactcattattttacacttgattctgatttctgtgaaaattttttaaagaagtaaaactgtattttcagatttcatgtgttttacataaaaattcaaagcaattcacaaaacaactggtagaactaattagttaatttaacattgttgcagaatagagggacaatatacaggaatcaactgtgtttttacatacttgtggaaaacaaatagaaaatttaaaaattctatttataatagcaacacaattttaatagtaataattaatcacaacattcctgaccttgtggcccagggaggattagatcattgcctcattcatctgagaaccactccttgagccctagacacaaagcagtgtcttgtagagaaacagcaattacaacttgaaatatttctccatgcagtccttgctttcctgatttcctcatcaataaagaagcatatacttggggggcgggggaactaaagctttcaaatctctcatgtatcttctttagcttctacattcaacaaatatttcacaataaactttggttttgctgcttctctccccaaacaaggacaatgccatagaagtttctgagtatttttccaccttctgtcaagggcttttgtctttttaatttcccattgttaaaaatgacacaattcaaggagctcacactctttgagttggagtctacctcaagtgcctctctgaatatgctacacaaaggagacggtttccttagcaacaggaatgtgatgagaaaaaaaaaaacatggaaatatttgctccctaactccttccccagcacccttcagccctgctgtttgccaggcacagaaactacgcttttgacaagaattcaagctcctgattagtttaaccattgtctataagtccctctacaaaccacttgctctatttttttcattaatgaaaccagttcagctgtggaatggtcattttctcattagtgcctttagctgttcttttctatatatttaagtaaagcagagaaagggaaattgggttttaaaaagtgtgtgtgtgtgcatgcttatgtgtgtgtgggtggtgggtggatatatgaatgtgattgtccagataagtggattttaagtaactgatagcatttatttttacatttatttccagtctctgaaatttgcatgtaagatatattttaaactctggcaggaggcaatgacatgtttagtgacctctatgaaaagtaatgtattaatttggcagtacttatgacacacttattaagtgtgcttctgaataaacccccatgaggttaatgtggttttctctgtatattaaaaattggcaagacaaacgtaggtatatgaacttacagatagaagactctaactgaggtctaaatccagggacatcattcagcaatatggagatcaatagatgtgattttcagtcctaaatgctcgctatgcctaggaaaccaataaacccacatcatttggggtccaaagcacaaccttttcccaatacagtttgtccctctttcctgtatcttttacttactcagagcaatgacataatatgcatataccgttgttgttcatttctaaattattttactgctgagcttatcagctattgaagaatgtttggtgtgttgtagactttctctttttttcaggtaattgaacaggtaattgagccacctgttcagcttggaactttaggaatctatgagtttgccaatatatttactgtatcttattcaggaagaagtcttccgcataagtagaaaaaacaaaagaattagtatctgccatttttttctttcatttttttattttcatttttttcctttcattttctctctctgtgtgtgtgtgtgtgtgtgtgtgtgtgtgtatgacttaaacaactgaaatttattttcccacagttgtggaggctaaaagatcataattaaagcattggcagatttgatttcttccgaagcgtttctcattgatttgccaatgtctgcccattctttttaaactgaagaattaaagaaaaatattaagtgtggaaaaccaatgtgctatgccaaagtgttcttataatatggccaacaaacactaacactttggattgttttaccaccagctagcattaaccaaaatagaaacagtgatcctgtgttcttcccatgtcgagccactcggttgttgtaagaattgcagtataccttcaggaactagaaggcatatattaagcatcacattgtatcttcatgtgtatttataaatggatcttaaaaccctaaaaatgacatgccagggtttattcaagaggctgtaaaaacactaaaaagacatccaaaagctttcctttctcccccttgttgtcgttgttggtttgtagcgacagtatctgactgtaaattatgtgactcagtaatgccagctctcaggatcccagggagctgtcttcctgtctctgctcacactggtggccctcagggttggtggcattgtcttgaagactggatacttgaattctgtccatttgcctgctggtgacagccagcacttgtacgatgacaactgccatctggctctttctgctagatttgtagcagaagcctcagttgagtttgggggatgcgagattctccagggaaggaagaacctctttgaaatcaccacagatggctttatttggggaagataacaggcacagaagtagaaggaggaggtaaaaaaaaaaaatccgctgggagtttgatgtctgctcctcttaaaagaacttaagatgaacttcattgattgatcaggactgtagtatgtgcatggaagaatttggaggcattgtgaaaccaaactgaaactttaaagattttgaaattaagcagcccatcatggcactgtggatattagactttcctaaggaaatgtgtgaatgtgatgtaaatttgccatgggaaaaagtgcattttcatggttcctaaatcattgtttcttgagagatgtcccacccacattaggattggcagggtggtgaatgggcttataaaaaaaatgcagataaatggatcttcctgaatttctgagggctgggcaccaccttccccaaaagactactcagtttttgtgggaagagtgcatttctctagtctctttcaaaagcactttttttccctgactgtaacagattctaatgctcaggcagatccgcttttctaaaatgcattctcaagcaattaatatgccattaatatttaagaaccactgccctaaagctaatctactttgagaattcttctgagttttattttcttctctatgttcaaaggaatacaagttggcaagtataccactgagttcaaatcgagggcaaattttcttccacgttttcaaaggcatctaggttgtcaggaacactgtctaatacagcaaatgtttgctttctctatatttagagatgcatttggagatgattaaaactataaggtgggtgggtaggcaacgtttagatgtaggtaaggtacgtgaaaaatttgacatctggctagcagtttttggctacttttaacacaaatctattcataagacctctgtgtcttcaaaagagcttcttctttatacagtaaccccacacacatgaagacagggctgtttatttgggaacagccctcctgcaccacctctgccttgtaccttagtgtctatggaggtgacctgttgccactgtcagcaaagtttgtgctttactctgttgctaaaaaaacaaacaaacaaaaccaaacctctggttttaaagggcatatttcaatattctcagagggaaaaatatctgagtggaattaagctccagtgagattcttgattattcaatggtgaaaagtggaagctaagataagatggattcccagtatatggagactagaaggattagcacctcagtcaccagtcatctgaaagctgtgagcaaaagagcttatgtcataagttttgtttctacaggtttaatttctaagtagaagcagaacaccaactttgtagccaggcagttatttattcatttcagcaagtgtttattgagcccctactaggacggcacacattcaaggaaatctgaagacacagactggcatcattccacactgaaaccgttgatgccatccatccatgagtccattcagacctgctgtgatttttacaacatgtttaaataacaaagaattttttccaaacacatatccctcaacaccaaggtcaaaaactttataataactacacagactctctctctcctctctctctctctctctctctctctctctcacacacacacacacacacacacacacacgcttttggaatacatatcattattcttacacttaaaattttattttgtcaagagtcaattgttattcttcaaatattttcaattaaaattacagagatattctgtggtaaaaatattctcctttgtgctagtaaacaagatggactatatcttgaacatgttaaaatgatatttgtgattaatatcagagaagtgctgatattatttctgagtttttgcttatttgctttctacatagaatcaataaaattgacaactagcattgcctatatatgcaggtgtgatactattcagggtactagtatattggccactcattatgaaactttcaggtcctcatatattttcttttattacaatgatctacttatttctgataaatattggattcatagaggctaaagggctgggaaaggaaaacattcgtgactacttacaaccatttgatacgagttgtgtcaatacagacctcacacagcagacatgcagtcaatatttcttgaataagcaaatgacacacttccctaaaataacactaagtattagtaaaaatggttcaaaaaggagggttctaagacgatggttccaatttattcttaatttgaaggcaggcatatattgaggttttataaaaccctaatttagcaatgttttaatggctagaagtttaaaaccagactcagacactagagccaagtaaactgtaagacacgatcacactctgagattattcaatgctggtgaggaggggccatttctctgctgtccctcaatgccttctttcattaaacattactgattctgatgcccagacacaccaggtcttctgagtattagaagaatattttagacttttaaaatagcatctggagaattgagtcagaggctacaatggggtacataaatatagtatcagacagttaaacatggggaaccactagacaagagttctaataataatagctctgtgtgtctttttaaaaatttaattacacagctagggttgagaaaaatccttcaaaagtctctgatctaattaaatggcactcttcaggtgcgttaaaacaccattggttttgattaatagttctcttacctgcctcatttctgcctctcttgggtatctcccttacaactgggctgttgatagaaggtggaatttttacatggccttagggtgacacattagagttaatgtcatattgtgaattgaagtcccgtgaggaccacctggaactgcagtttgtgcatctggtaaattttaaaagtcttgatatgtgtttaacattcaactgtctctcattgatgtgcctcaccaaggtgtggagttgagtactggctgaccctctgccatgcttgtcaccatgcagttacaatattatggacaagagctattatctaatcccatggaaccacatggagcttggacggtcactagaatggaacaaaacccctgaaaatcctttagcggctattgtaaaattgaatagatattacagaaatgaatctggtgcattgatcttgactttgaaggcataactgactttagcggcagtttagatgtctgggtagggccatcctacagtaccagtatagaaaccatgtgttaaattgtattatttccgaagttttcatcacctttgagtatttgtagaactattcagaaaaatcttcatcaacagtaaaatttggcgatgattactttgtaactcaaatattattttcaggccgggcatggtagctcatgcctgtaatcccagtactttgggaggccaaggtgggaggatcacttgagcccaggagtttgagacccgcctgggcaacatagggaaatccccatatctccaaacaaacaaacaaccatacaaaagaaatatgattttcagagaggattgaattgctaaggatggctacaatgaaaaaaaaagtacatttagaaagaataacctgttttatgaaatgaaattaaatattagtgtctgttcctgcctcatagaagattatggcaaaagttttcacttttttggtaacctaaaaatataaggtggatgaaaaaataacatttaattttaacctctaagaaatctcttagagacacatatcttggtcaagaagaattataacagtataatatgcatgcttttgcatgataaatagcgtttttagaaatgtttacttttattatcatggctttgatttcaaatgctgacagcttgcactaaaacatttaaaagttgtcaactacataaagtgtgtggcaaaagattttatgaggtttttttcctccaagtattttcttttcttctcttcaatggctgatgtatgctcctgggcttctgagttaaatttggattcttatgtgctttcctccatgcattcccgaggtgagatactgatttatgacagtgagtggatattccgggattgaccacagaaagtgacacacctgcatcccatacttcaggtgaccttcttaagcatagttttctttggtcacaaaagagattactaaggactcagaatacagagccaaaaggcaagcctagataatgttttgtggggttttagtgttctgtttgcatatatgtatacattttgtttttctaactggttctggagagataaatgtaaggacaccacttttactaaaaaattatagttctgccatttgtatatcatagaaatacatatgcatagaggaatatagaggaattttacattcttattgagtgtggcaagcagtttaacattcattatttctaaaaccttttcacttcacaggatctgatttaatgttctatattccattgattaaatgtgaagttataacatcagaactaaaatcataagcaatacattatgttctcatgtacctactattgctaaaggacaaggaaaattctacttaggttaattattttaaatcaaaattatccgttttaagtaattgaacttatatggaatttttgcagaaattatatcatttttcacaccttactaaacaatatatacactgataatattattatttgttgttaccttaaatatcctgagcttacccttctttttcaaggtttacatctgtcaaaatgtcaaattctaagcaggattgccttgccctcatcttttttcttcttcggtaatttgtgttgagagagtgatagcaaagcttgttagaaacatgtctgagattgattctgagagatagttaagaagctcagctaagaacagaaaccaagcgagtggggtagaagggaaatgctgtaatgtgtagttaactggatcccctctttcaccctgagtccttcagtttattgcataagtgaagcatcagtatactgaaatcagccagcaagctttcttgtcagttgagcatagctgggatacaattttgcacacaccttctcgccaaggaacaaaactccaccattccaaacaaagaggtgacatgtaaatgtaaatgaagacagagtgctttcaatgcttcttaaaataaattgaaatgtaaggagtttcttcctagtgagttataaaatgagaaagatagaaaagacaaaaataagtcttttaaaataggttaacctcaataattactacatataaataatttattctacataatggaatggttaagcataagaactaaggaatttgatttcctgagttaaaatttctgccatttatatctgtgtgaccttaaacaaagtaactactttgtggctcagtgttctcatatgtaaaataaagaagatctgaggactagctcatcaaggattaaatacagtaatgcaagtgaggggcatttagtgtttgacacatagagagcaatgactgattattaatgtagctctgggtaccatgtagagcctgtacaagaaatgagcactgattctgaaaactattctaagtaccccctctattatttatgtggagtatccaataaccaatgcattcagtgatcttccacggaaatttaactctctggattttaaatgctactcacatgcaactagagtcatgtttttattctttgaaaacaaaatgggaattttgaattctattcatttggttaaatacagccacatggctctcccaagttccattctgaaactaatttgtaaatcttcacaagttggagtagtaatggcacacatacttaaggtaatgttgaatgcagcatggaggtgccaatctctttattgatgtaaacaagagaggctttgctacttaaaaaacaaaaaagaagaagaaggagaagaagcactaacacagaatgaaataatcaggtgctaatttgtttctttgcctgccctagatgccactgtatgtgaaggattatcatagaaaatgcattctttctggaattttgagcctttaggcatttgacgtgccaattgccttcacttggttgtagtctgtaatttatcactggagtgtcctaccctgctcaaacgcaccctttgtgggcagaggcaaagctaatatactctccaagtatatttgaattgcttcaataaatcacagctgccactgtaagcagttttatcatttgccagaacaataagttatcattttaccttatagatgcaatgctttccaagacttttatttgtgtaaattgtaatgcaccatcacctatttcttaaaatacaattaagaagctcatattatacatatgtgtgtgtgtgtgtgtgtgtacatgaatatataaacatattttaaggtgcaaggaagtattccaaggcaatggtgtgagcttaccaagaaatggggcattttttatcctgcttattttatagcagcaattactataatggtgtgagcattaaatgcttggaattggggttaaacttcatttagctctttactgctccagtgtctcagtgaaaccactctgtaaagaaataggactaagcacaaatcattcctgttaggcctgccatgcatgagatggagaaacctgatgttttaacatattgtccacctctactgataactctacagacagtcatttcaataaatcaagctgtggaatcaaatttttggccatagtgatctctgggacttactttcaatttcttctttatttcacgatgaccaaaccacaagtcagaatgcacctgacttaaatcctttagacttctgaggaagtaaatgtactatatgaagatatcatgtcttaagtttctaataaggcaaaaataatctaacttttatactgtttctggactctcttcaccatgatggacaataaagtgtgctcttttttgttggcctgactgaaaaactgcttaatatttataaattaatttgccatcagttcttgaatgataagaaaataattttgtttgtaattgcctcaatagttcactccaagcagagaaaagaagtctataaaaatgccaagttttataattagaaactaatttatttgtttcaaagccaagtgttttcctatgtacatggtaatatttgaattagctttaattctgtctgcatttattaacaagaagggacttatatgtcctatcatgaaatttcagacttttccatgcagctctgtcagtttgcaatggctgtttatttttatattacactccttgatagccattactaagaacttcataaacctcctcttcatgcctgactacaggatctctaacccagtgtttctaggtggtggtaccatcataaaacccttgaacaaaactcccagcccaccagtccttaaacattattattcaaatcagcatgggaactctgccatcatccccatcattcaggtgcacccatgcttttcacctcatcactcacacttacacagtttctggctctatcaacaacttccttgcttgtctgaggcctgacccaataaacgcatccagctccaggctcataccatgcccagtgccccatgcttttccgtgtgtgtgtgtgtgtgtgtgtgtgtgtgtgtgtgtgtgtgtgtgtgtgtgtgtgtgtttgcatgatgaatgaaggatggagaggataggcttgagatgaggattcagattctccactgttttaagtagatagaattttgcctttccccttcccatttcctcttttccccagaccctcacctcattcccttttctcttttaatccatggaaggaaagtggtttcctgttctccaggatagattcagctggcaaattctactccaaacagtaagtggaaggaggcctatcatttggaagatttggtcattttcagaaatatggaacattggctaacacggacatatagtctaaattcttttctagaaaaccaattatgtgagactatcactagtttataattactcatttaataaaataaaaataaccgatatttgatttatgatagcatcactaatttcaatagtagtgtgtctttgaagaaaagaaatatacaacaaaaggagcattacttcgtgtatgattgcttctataaggaatcccattcacaaatttgctttttactaaaaatcccattttagcatgttgagttttacatttttaaggcttaattaagcatgactcactctgatttgtcttatcactgaaaggccacctgcacccttttctaaatcattaccataatacagtgttattactataatcattttatcattaactgcttgctatttattgtcatgttatcagagtatcctttaaacactagaataacatttttaaatcctaaattcactttacaggcatagtttactaaagaattagaaatgttatatgttacagatattagaaaaggctagtatataagaatctcttctttgagtgtcaacctatgttaagcctaagtgaaaggtaatgggaaatgattatcaataatccttgaagaaatttctttctctctcttcctctctttctctctcactctctgtctatacatatgtgtatatttatgtgtatgtgtatatacatgattatatatgcatatgattatatacctatatcttgagaaagtaaaaatcatctgagaccgagaaagtagaaagctgcacagcctttcatcaggctgcagtagcagacacagattattccaggagaaaaattaacaggaaacaacatgcccgcgaagaggcactgcaaccatagggtatcataataacccttttatttgagtgactactgccctctccactcttgcctggaacacctatgttactgtaacataaagtagcagcctcaatttacaacccaagggtggagcttcaggtagacatttctgctcacaagattccacatctatcttagctttgtggttccaaaggaaataggatcctgagtctgctatgcagtctaggcaggatgttgactccttgacacagccccgctttgctttaagtctgtcaaaacactgcttcatttaaaaattatttaatggtcctgagttcgctatcttttgttgctgagataccctgtggctcctctgctttactgcctccctcattgcaaagaataataatttgtcagactgcagttttgatcttggttatcttaggttcgctaggctaacactatctctatctatccttccaagcccttttgatgataatttggagcagactttctttgttccctgcatagaaaagaacacattcccgtaactaaagccatactatcttgctaagaaacagaaaaggccatttgatatggaaacagtggtagcagagtcattgcttggaagggcatatggtggtttggcttgaaaatgtacaaacaatttattgctaactaccaaaataagaagtgtacaactcttgtgggagtgtgggagtatgtagcgacgaagaagtttcacaatccaggtgactccctacttaaagttgccatgttggtacagttaacagaatacactgcatcagtgcaaatctaaaagaagctagaagccttctccatcaaaacagttgttgactacaaaatactcattcaaaaaaacattttttatattccctgggatgaaatccaaatctattttatatgagactctgcttccctgcatagccccaaactatgcttctaaattatcttatagaaagaacatcttagttccgtagatgtctaaaattcctccttttattcatttctttttcttcatcaacttgtcctaggaaagagtgggttggtgttaccaaaggtagtttatttcaagatatatattggcaagattagtaaaatggttcagcattcttagccttggaacagtttgatgctttcatagctcaggctgcctccaatcttagaaatgtggcctttcatctcaattatctggaaactgagcattctagaatagcatatggttcttttcaccacaggcagaatttactgtttgtagtcaaacagttgctgccacatttttagaagactcttgaagaatggtctgaagacacacccagcctttagaaaagtgaatgcacttgactatgagttttcattggtgggcagtgattttcccaccttgtgtggatttcacaattgctgagcactatttttgagcttggtagatagcctgccagaagaattaaacataaaatgcttaaattgtaaacagtagcctgctgaatgtatcctatgccacaattctttatgccctaatcaacagtttgtgtcatttatgatttattctacaatgaaaggctatgttgagaatcactgcagtaatatatcattttgattagtagatggctgtttggtgcaacaaatagaatgaattactagtcaataaggaggatccaggattttcaaagtaaagcaggacaatactcatcaatattgggtaaacattaaggtcatgaattgagggagctggaagggtcatccagtactctcatttttaacctgaagaaactgcggaatagttggatatgcaccttgctcaaagctacagagctcatctgcgagtgccctggggctccacttagaaataattttctttctcttttgtcgagtgctatctctccctaggacctacagtcccacttggccagcatgggaagtcagagtgttgatggtcacagttctttgcaggctggcgtttcctgacctctgggcacattggtgaccattgcctcagagttacctgcaggttccactctctagagttaagaagtttatgtgaagtatcacataacatcagaaggtaatgattgtttttttttttttaagatgcagtctcactctgttgcccaggctggagtgcagtggcatgatctcagctcactgcaacctccacctcctgggttcaagcgattctcctgcctcagcctcctgagtagctgggactacaggcgcccatcatcatgcctggctaatttttgtatttttagtaatgacggggtttcaccatgttggccagcctcgtcttcaattcctgacctcaggtaatctgcctgccgtggcctcccaaagtgctgggattacaggcatgagccaccgtgcctggacaggaggtaatgatattttatctatcaacatttattcaacaataatacaatacatttcttaggcacctattgtgtgcaggcatcacactgcatagaatgtgcagggtaagcaaaatgtgaacagtgagacaaagataaataatatagaagtagtctcttaagggaattatagtcaagaaggaaaggaaaagtgactgaaaatcatggcataatcatataaattaaagcattttcaaaggcctttggactatattatgttcagatcaagagttttattttgtttttgttttttgtttgtttattcttaatcatgttaatgtagactgactttaacagaccttaagaaaatctaattcacatcaggcaagatttattttttttaacaacttaatatcagatttggttcaggcttaatattatctttgtaactagcaaatgtagctgttatttgaagccattaaaatactaaatttggctgcagctggttattgcacccagtcagaaatgtaaaactgatgaatttgacaagtttaatttgaagcatttgtgggcatctgctgaagtatgaagtatccgtatcagttattcttggaaatgaaatgaaaagaaagaatacttaaatggcaaacatcttccagagctgaaaaaaattgtgtcataataatatttaccaaattgtcctaataaaacagttctgtttgaattttagaatgttagactcaaaagaaatcttaaacagatccagtttagcccaggcccctagctttacagtcagattaatgatgaggaaactgaggccaaaaaaagttaagtaacctactcagagccttactactcagtaaaatgtcatgagctgatattcagtttgctgaacaattggttggtgattagtccagcactccagcactccttgttttagcagtcaggtatgttttctgcgctcagagatgagtcagcatcctcctgggtggacctcaaaatctcacattctctaccacatttccattatgcctttttcaatcccaacatgtttttcttctagtccagtgaacttactctacaagatatagtcctcctctctttttattccactttattttgggcagtcatctgtgtggcaatcacagatttattagttgcaaataaatgaaagagctttggatgcctgaaaacagctgcacaggcttgcctgggttgatgcattgatgtcagcctccgagctcagggtgtgtgccagagtctggatcagctgctcttacagaattgcactcctataacacagtctgtcattattaggttgcaattatttttgcctacagctggctatttttcatagccattttactttttatcaaagtgagataaaaaggattttgtgcttgaaaagctgctgttttggccatatcttgagcataagcattgaatttcttatcattcataggactcaagcagggtcttgaaaatgagtagaaagtatatcatcttaaggataaaacatattgttacaatataatgcatttttggtgaaccctgggagtggcgtactcttagcaggaagtgaatttcaacttcaaatcgttttttaaattataattatgggcaacttgagtgctttctatataccagacagtttgcttaagggtattacatggcttaatcttctccctgaccgtatgagattgatatcattaattgtgtcaccttccctattttacagatgatggaagtagaaatttggcaggggaagtaactgccgtaggatatacaaggagtctgtcttaaagaccaggtctttccataataaattgcctctcatgacttgacaatttatgcctacaaaatcaaacaataattgtatttacttcctccctcaaaatggtttttaccagtgttagaatgtttgcatcccctgagacatcattagatgtctagtcatggatagtaggtatcaaatagcagctctctcacacctaggtaaagtggttgtaatcatttatttttaagctactgaactatgtccttcatcatgatcttgttaataatgccaggccactaaggagttatagttcatgaaatttcatcatgtaagctttccaagggccctcacctgctgaaatgacaactttttttaattaaaattttatcctcaaaagtaacagccgtatgtgtttttttagttagttaataataaaactaattattgtgctacatcttagactacatctgttttaaatatgggcacttgtagctttgtgttctctggcatcattaacaaggcaatatcaactaagctgatgattctatcaggaggtactggggacacattttaatcagacacatttgtaaggcagtgactgtgtcccgcttttgctgtaagtcatattgatggtgaggtactaaagcttcactgctcagttaagtgttccttacaaatgtagctatggtaagatagagatcatttccaaaaatgtgcttactgacttgataacagtttaaaaatgacttcctatcaggtgcagtgctgtgcgcctatagtcccagctactcgggaggctgaggcaggaggattgcttgagcctagaagtttgatgccagcctgcgcaacatagcaaggcccttataagaaaatttcccatatgataaaaaatgtttttaaaatatggctgaaaatattactatgtgagacaaaatttatactttgggatgtcatatcaggaaaatttgcttctacattaaatttacaaagacctctccaagctgtgggttgtccctcttggatcagtcttagatgcctgaacttatctaagtgacattgaattgctctttatcaatggatatgcattctttgtgaattcttcaagctctccctccctcttctacccccttttaaatacttagaatccttctggaggagtgtattgagaagcagactccgtttgaattgtgttatacttggatgataaagaatgagttactcatctctcctgctgaattaaggattttcaattctggattcttgtgactgggtttctgggcttccagaagaaaccagagaaattttattcaaattgcttttatatgtgcctatgtacaattaagtagaaaagtggttctagagaaattttctctggagaaagtttcagagaaattttatgcaaaataacttttgtatgtggctaggtacagttaactagaaaagggcctcaatacttttatcaaatctttgatgtgatccatatttctttataaatattaaatgtcagtgtccttgatcaataatttttcttagtagtgccctgttcttcccatttcaaagatgagtgagaaaactaagcagcagttcctaaactgaggactgaaggtttctgggagtttctgctgttaaagatagtaagtaaaatatgtcaatttaaataagattaatacaaattaatataaccattctatcccaccccactccccaaagaaagaattttggaaatgctctctgagtgactggtagtagaaattcgatgagggagcatgccacaacttaatcattcatttctgtaggcactgttttgaacctaattagatgccaagctgttttaaatagttttaatcccttgtcttacactgattaacttacatgcatagtgaacaattggttaaagacaaagaaaatgagaaacaaatgcaatttatcaggagcgcagaatgaatcccatttctctaagttcatttcaacaaaactttcactgtgtttataaaaatgtatatgcatatgcatacacatgaaaacacagtgtatgtgcatatgtgtgtaaatgtacatatgtgtgtgaatgtgagtgtatatacatatgtgtgtgtatatatatgtagttactgtacaatttaccatctgagcccatccacatttgacagggaaaaagagggctattaataaataaactagagctatagccattaacagacatatctggtcatcccatataaaactggaaaatttgtgttttattaaaacaaagttaggagtcagaaagttggattggattttaatcttcattttatgcaatatattttacaatatatattaaatataagctactgattaaaaataagcaaataaattccaaaatatagagacagaaaatagtgacatttatatctcatttccttttttttgaaagaataaaggctatctataatctgtaatatgtttttctgtggataagtgcttgcagtgagcagcataaatgcttttgtcttattgatcaattagaaacaaaacacaaagatcaaaaccagccagctgactttttaaatgcataaagtgtaatattttcaaacattgtttggatattttgtctattttggtactttaacatgtctttaatttaatgtccattttactatttcttcagtccctaaagcccaacatttcaaaatatgtctgtttataaatcatatttttacataaatagaaaataaataaaacaccatttatcatttattaaatggggaaaagtaaaattgttccatgtgtgttgagaatgttattaaacattgcattttaaagaatattagaatattatcaataatatgttaattgaaatattatgctttctttaaaaaaatcacttgctcaatcttttagtgcacaaaaaatttacaaaatggttacattagaaacactgggaaagtggaagattctctatacctctgcaagggactcagatgtgttaggtactgagaagccctgtaatagtctaacaagttagaagacaagcccttcatgacagcagctggccagggaaagcagaggaagggtgggcaacattttgtgtcttatctttgatgcaatgacacggagctccacttaataagtcaccagaaaaagttggaaaggtacctgcttgaatccagagtgcactcagcacccttttgccctaggatggctttgggtgaaagacagttctcctttgatggggagaaaatgtagcctgttgtaggaagtgtaagcatagctttgattaggagacaaaggacacagtggaactgagtttattccttatatgaggacaagaaggagacctcaattttctccgaatacttggtgacacatatggagtagagcttctaactaaggaatacagcagactggctgtcctaaaattacagcccagaaatcactgctctcccagggatgggagtctgggcccaagtgcctttctaggtggttcctgcctggatatctgcttcccagttaggaccagcttgaccttccactccctgctgtatggagagttttgcctaccatcattttcagagctgcttctgccacttttgctactagggattaaaatttctctataatccaaaggcagaaaagagcattcattgcctgacccatgttctcttccatgtgactagcacataatggctgtacctcggctcttgtggaaatttagagtgtggaagccgtagaaggagcagttccaggaatagtgtgtgtgtgcctttgtttttggcagatccatcttgatactaccaacacccagtttgttctaaatctatggaataattctggagagaatgaaaatacccctatttactgagcaccatttagtggaaactaatggtaactactacacagtaaatgccatgtgctgagcaagtcacgttacctgatagctacctgaccttcacaaaagccctgggaaagtgggaattaacttgctcccagttaataagcaagaaaagtgaagctcagagatatcaggcaacttcccagagtctcacagagtcagtggttggaagaactagcatggagcttgtgaatttcccattagaaagcaaaaattccttagatttaaaccagaaaactatttagtctcatttaaatatcacttcatactattcaccttgaagatgattgctttaaatatttgaacaaattatggctaaatgtactaaacttgagactaacttccagtatagcatttctaaaccaaatatgatgtcagaattgcaaggaccagttaaggtcattgtagaaataaactagatcctccttttttctttttcatttccctgaaatagtcttcacccattgttatctatttgatctcagccatctggttctgcagccagagaaggaaaatgtcaaattcaacaaaatgagtagtactgcttgagatgaatcataatttaactttttttttgctctacaagatatttaaacagtaacattgcttaataatacttcctaagttattatcaattccctacaaacgttgccatttcatccaaatggaaaggcaagcattaggactatgagtcaaacactctaccctaatatctaatgacatataaatttgagagttaacatttactttaattgctgaagcagtcatgctaagtgcatcatctgacatattaccaggtgttaaaaagggtaatttctgaggggaaaaaagtctctaaaaccaagagacagtattccactaaaagcgttgttcatctcttttaaaaaatcttcagttaaatagattgcctcagtagtttgggaaatggtccctgacatggaaacatatttctgtaatctttgaagggaaggggagtgctggttattctctgtgtttcctcccaacacatagccattctctatccatctctcctgaccccatgagctgcatctgtcaggttcctttgccccctggtttccacctgggttttgctaatggaaggcatcagctgcaagagatcaaagggcagagggagagagagcaggcagagggagagccagcgagcagtcctcaccgttcccttttcaccttgggatgcagctggttctggcaggcagcccctcctctcagctcttgctaactgctcctaacactggtttctcccctaagacctacagacaaggggagaaaacagttccctactgttattatgctctggtgtcttcctcacttgttgatccctcaacttacctactccctttgttaaaacctcttcaattgaatcatttcagtggaattccattgcttgacaggactctgaggagatgggggaaaagtcactaaaatacctgtgtcctaattctggcactactaaactgtatggtctgaaacgatctacacaattcctcgagcttcacttttatcttctataaagtgagaataataatgatacccacttcacaaagcactgagccccgtgagtacaataaggtgcaccaggaattgttactattagtttgaataaagaaaggagactgcttgctttcctgtttgagttagtgtaagtgtaatccactatatggcctccttgaaattttgtctattggtaattaactactaatatgtatttctaaactttgggatagaatgatagaaatgagctgatagttttaaaagagatggtttgattccattttttacaactcatacatttcttgaacctccaaaacttatattttctttctccctaatggcttactctgtgttatcttagaaaagtttgttggtagatactgggggcaaattaggtaagtccacttcacatataaaagatgtattctccgggttcctagtaatgacacaatagcagcagaagtggcacaattgggggaagaaaatggctttttctcccaattatgaagtacttgtggactattaccaacaaaacagaacacaattcctcagtgtgagcattcaggaagcaaaaatatttattgcagtctagtctgccacatttggaggaagcaccgtggcatgtatgttggggaagttagttaccaaaaactgggattttgtccctgatttatgagaaattctgtgtgtgatcctgaacaagaagctgtcttactcctctaaacctcagctgcagcacccagagtttcttgtgccaggatatcaccacatccattgtgcatactcaagataaatgaatgtaggcttagtgagggtcaaaaaaaaaaagtggggggcaggtggtggttagaaaagcaagtaataccacctcaaggaggagtaggtgagatccagtctcttgtttgcttttcttttaggtaaactgttaaagcatattcataaaggagcaaactcacatttacaacctaaaaaacatcaggctataagaatctcatcttgttttccaaatgccttgccaagtttgagaatgccaaacagaatctgtttcagatgcctttttccctcccttttctcactcctccttttagtccctttccatattccctcctcctttccctttctggacctgtcattgccccatgccaaaatcaagaagtagaatttaaaaactgtgctgttagaaggaacctctttcacatccccttgcccagaggcaaaggggataagagaaagtagttactgtctgtccagatttttttacactattgtgataatgataaatcattccccctctgcactggcaaggctttggactctgtgttctgtatacgttgcctcttcatcattttcttcaagtttttatttgctagctttttttctacctatgtgccattgcaagatacttatggagtggctggaataggacagtttctttatcagcatcatcaatgaatgttcttgaggcactgcatgtgaaatacagggctaagcaaacatgtttaagatatgcttcttttcctagaggattgcaatctacctaagaagcaggagctaaataagtaataaaatgcaattcaaagtcataaaagtggggagtgcaaagaatgaggaatgggcagttgcatatattggttattgccagaggctgaaccactggtgtatgtcctacaagagagatattagcctatcctgacaccttttgatgaaaatattgtgcccattttacagataagaacaatgaactaagagagtagagatggcctcccccgcagtgtaatttgccagatcccactacttactctgtgagggaaaaaaaataatgagtgggctaaacaataggaattcaaggtaatgtgtttgaaagccaaggcccaacagagattctcgaagtgtggtacccagacaagaagcatcagcatcacctgggaacctgtcagaaatgcatatgtttgagccgcaaccgaaacctgctcaatcagaatctaagcgtctgggcattaaggcttagcaattcgtattttaatagggccccagaggttatctggaggcaggctaaagttgagaatcattgacccaggaacaacgtatttcagctggatggggaagcaggcaatcagagacagaggcgagatggtgaggctgggttgagtggcaagcagtgataatccaaagctctgagatggcagcctgcagacctggctgggtgtgaatgggcctactatagcacccctcagtgagtagcctggtgtcctgctgaggataaaatgtgaggactgttcccagctttcttagaccacgtggtcctgctatgtcattactctgaagacagggatccctctgcctgagaatttagatagctggttgtcccttgtgagggagctcctctgcagcctcaagggaacttcaagaaaagaggtttatgaccacttaaaaatactcatggcttcatttggatgcttataaagcacttttaatcatgatgaaatgcaagtattgcctttgaatgccttgagttgaagggaaaagttaacgagtgaatgatttgaatcatttctcttcttagcctggagcaagccattaaaagaatgaaacttctagtcaagatggaaacagcctgccccaaagggatgattgaaagagtcttcaggacaggcatttgtcctttagttttattttcactttaattattataaaatctgatttaagtgttgaccatagcctccagttccagccagctgaaaagataagcacatttgtatttgtgtggacaagtctgcagacttcttattgttgtctcaagccagacaatacaacccttttaaataacagttcctcataaggtgagattaaagatatttcttcttgctgttaccaaggaaaatcatgatctagttgattatgtacatgaaaagaaagtatctcttggctattgcttggggttgtgacatcatctggtgtccactatctttactttgggtaaatcattgctgtaatattgatgaaattacaaaataatggagaatcagaggtcatgttccccaactctaactataatgaaaactttaaaaatgtttagtcccaaattctccttggaaaacattggttacaggtaaaatacataaatttatatcaaacttagttgtgttgttgttgttttcaatgagctatacattagataacctagaactaatcaattgctgttgagctgtaatgaaatgtaaacaagtggaccttgtattttttatggcattctgaaatttaaatctaactgattgtagctaactgaaccttaaggaaaaatcagaggaaacttgatcctgaaaacattagcacttagcattttgtacgtacatatgctcaaatatgtatccatggtatggcaaaaaaatatcttactgaagcctgtttcagtttcttcatggaaatttcagttgattgtccattttagtaaataatatagagcatgttattcctatcaaccgatcctgtcaattaatttagtttgcagtggagagtttgtgggaccatggacttctccttgatctttaaccaagtcttccctgggttattgcaattccatgtggatcaaacaacactaatcatgttcataaaataaataagcacatatttccttcaggttcttctcagaagttatcttgggtagcttctgttgtcttcccagaatgatgtgacagcatttggttgtaactcctaataagctctctgacctgtcttgtatcctcaagaggaaaaaccccaggacactttgctgctggatcaaataaagtaaatagtagtagtaggtgacatggagagctactagatgattcagagggaaagttaaactctctgtcacccaaatcccagccttcttggttgtatgcaaccgttgatgttgaatgtgctatgaattatgacaggtttatagattttcttactctttcccaggtttttcattattttaatctctccttttaaaatatactaattcttacatttataccatgttaaaacagcaagaaaaacaaaactataaaatcccatcaaccctatgcctccctctggctctctgctcctttctctgcccagcatggtgcttcactgccaggcttctcaagcttctcaaaggaattctttttcttcctgtctggctgatgtacccatcactagccttgcttttattgaggtcaccggtttgtttgtttttttaacctagggtctgctgtcttttcttccttggcagttctgcaactgtggtcattgtcacatttttctttcttgaaacactcccctacttcttacttgataccattctcttctggttcttctcattttcctactactcctcattccccatccaggttttattttctcagcccagtatttgaatatgattgtgccttacaactccattttgatagtcttctcaattggtacccactcataaatatattgtctttagagcaactatgtcctgataacttccaaatttatgcctttaagacaggctgtttgtctgagccccaaaccccagactttttgctcatgtgtttaccgatcatctctatatacttgttctttctgtatttatagctaaggcactgcattccacttccttacccaaacttgaacctggaatttattcttgtgttttttttttaatttctttcaccccctccttgccgctcatagatgccagtttctgacagttcacatcctacatctatctctctctctgatgtgtctcttttctctgttgctgccacccttttcttaacttcatgtcttcatcatctctgccctggattattgcttttgctttccagtagactttctacttccagttatacaaccccacattgtctcatggagaagttttatgaaatggctgttgatcatttcattgctctgcttataaaccttatattgcaccttaagtctttcagcattaaattccagttttatagcacgcttttcaagactctaggatttgagcctagctccatttctatcctctacttcctctgcctgtttctaacctattgctatgcctgtatatttacaattctcgaatgcatttttttgtatctttgccctttgcacatgctgatccttatgtttatgcctcttttattctgattatttccacattgccctaccccattagcaaatatctgctcatctaatactaggttcaatatgacctcctggaagctttccactgcatgcttctcatatccctacacacaatagaagtaagtactctttcttcagtgattctagagttggagacaggtgcctatccaagtgtactgcaagattctgtttatggcctgtctccaccatttgtgtaagctctgtaaatggcttttatggtcatttttataccaagtggcaagaagaaatagtcaataacattgtggaaaaaagaatcaaagcaacaaaaatgtacatgaactgaaaatatgattgcttgacattgaatattaggtcattagcatgccagagctatctcatgctggctcacaagagccaaatgtttaaaaaccaggaatcttgccagctagttgttaagccctttgaggcttgaaagtaggcatggtgggaatatttacactagggaaatcagcaaacaccacaaatcagcgcttttgtttttcagagagacagttttccagcagactactgatattcatgattacagtgcagtcagttaattcatgctatgtccatcaaccatgtgatagcaccagaaatcatagactcatgttctgaaagttcatatcctaaataactctctgtgcctcttctttccattcctataccaccttgccttagttcctgtcttcgttgtctttgccctagaaaactactgttgcctcccagtagatggtaccaccagaacaatattattgttaaacctaccactagaacaatctttgagcaagagtcctgccagtctggaatcgaagaagttagttatcgttgactccttgggaataataatgtataatgctttattatataaagagggcacttttaatttatcatcagttgcttatgaaataatttctttttttttttcagttgcagtgacaggtggatttctacagactgaatctgtggccatagtacttatttcaagataattggccaaggctaggttacatcctgtagccatgcaacagtgacagtaatttgatcacaataatgctgaccccatgacttttgacttcataattatcttgctgtagtcagctggccaacagcacttcatcaatgaaaatatccaccaggaggaatattatcatggggacagttattagagccacctccattttgactttgccccaagcttggtctggggaaaaagcttcttaaagttgcctcagcagtagtttgctgcctcccagcctggttttaagtatatccataattaacacgacgggtagaggtgcaagaatgccacattttcttctaagccatgcaacctcattaagaaagtaaaacgtttgtgagtctttcatgcggtctttctccctctgggttgttgaagctctctggatgtcagcacagcactatgggccaggaaagttcagagaattacttcaataatatgacagcctcttccatttaaaatggaattcaatgctggcttcccttggaggcattcattgaaattccgtgcatgatccattcctctagtcatttaacaatgtgtctcatgtttgccctgatttaaagaaagaaagaaagaaagaaagaaaaccagctttgtatttgtgataacatggatcaggatagtataattgcagtgaagaggcccctgagcctgcagtaataggatggttcatctgatgtgtactgccattagaaaatgacccatgcatgaatgttctcaggggacagtaaagaggcttttaagaattacattctgtgtagtatgaaagctaatgagcaaaagaggaagtacgaagaaaaactactgcttcaggaagcatggttccacttaggtagggcctgtcacagctcccctcaaattcatttggatagacaggccattactaggatgactactatattacccccatgcccatgcacactccctgcaggtcatcctgtaccaagttcctaaggaattaaaaccagcgagtaataaatggtgaggaaaagaaagaggatggatacagcaactgccaataaataagttaaaaaaagacatttacgtcaaagatgaaagaagtcgtaatgaacttcaacagcaaaaaagaaagttaaagggaaaaaagcaatttctggtacatcctctttccacgttatgctattttacttcatatataagaacagaacagtacctaattatgatttcaagtatatatattttaaccgtatcttaatttgtaaacatgtttaaaaataatgtctccagtctagtctatactgctttcttgttttaaaggttttacttggccgggcgtggtggttcacgcctgtaatcccggcactttgggaggccaagacaggcagatcatgaggtcaagagatcgagaccatcctggccaacatggtgaaactccatctctactaaaaatacaaaaattagctgggtgtggtggtgcgtgcctgttttcccagctacttaggaggctgaggcaggaggaggagaatcatttgaacccaggaggcaggggttgcagtgaactgagattgcaccactgcactccagcctgacgacggagtgagatttcatctcaaaaaaaaaaaaaaaagttctacttagggttttagattacataaattgggaggttggcatataggcaaaagaaagagtcacaccttgtttatcaaagttaacaaactttgacaaaccaagtggtttgtcaaaccacgtttacattgtcattccttggatttatctcctgggagttgaattagagtaagatagaggctataaaggccagtaaaatcgatgccttccttgtgcccgaggacccctggttctgataggcttcattgtgagtgaaactgtggaggctgtcttctgctttacgtgagggagaagttggaggcaggaacatccatgaccccaaaattcacctctctgaggcataaggcagtgactcctctttcaccaaaccatagtgatactaaaatatcaagctgtgtgtctgttttctccacctaaggctactgtgaacaccacagtgctatcaatagatgaagctagaaaatatttctgtcttaaaggtgatgtgccccagtaatgaagtgagacaggaaaaaaatccatagtgttcacagaattagaaagcagactgacagtagtctatgaattccaaaattagaagtggcctgagaggtctttatttctccaggccttcatctgatgtcccaggttgtttggcagagtccctgtgtatcttctttttttataacctaattttatctttcaaataatataaatgctattcttgtttctaaaggccaagttactttcccagaggcagccagtagcctggaacagtcaaatcattgaattgatcttatatttaagcagaattaagctatttgcacatttcaagattttaagattatttcgagaaaacaaaccagaataaatatagtctcttcaaagattgtgaggaaagccattatttgaaatggtcctagtaattaaaagctatagtatcactgattagaaatgaagtaaatgaagggacaagagtctgtttgaatagcctcacccatacctcacccctcaactgtcttcctggtgtttcgctctctaagtaacatgtcttcaaactgttaatgagtgatatgagttgattctgataggcagtcatgttttacatttaatttctcttgtttttctttatttgatattaataaagtcttgttcagcaaactgtggagcataattcttatcttttttacttaattgttttaaatattgagaaaacaattaacataataagcagtcattgaatacttgccacataaaagggatgatgtgagggctatgagaactagaagaatgtataaataaatggtactacaatttagcacagaaaagcaaggatgccaaagtcagaaaaccacaatttaaattttagctacaattcctcgtaatagctctgtgaccttgacaagttactatatcctcctaagtcacagttttctcttctgcaaatggagtttagtaatattgactgcctcctaagattgtcataacaagagcttaattcactgtttggcttagagtaagtgatcaacaaatatagctagtttataatggaaaatcctcaaagaagataaagtacagaagaattgacagggagccaagaaaacagaaccaggcagatactgtaaagtggcaaaatgcaaaaattgtaaaactgcagctaaagacagggcttttctggataagcaattttcttcttcatattcttcaccagctatactattaagctaagctactgtaattctacctcacaccgtgtacaaagagcagagtttgattcagaatcagggctcttgctggttcctttgaaatttggagaaatattcgtatcttgtcttcaagagaagtaatttttatatgaagcagcttgctaactctaatcatttgaaaagacattctaccatattaagattacttcccttaatagacacatgtatatcacactgcttgggtggactgggagaggctgtgagaattggccagcttctgaagaaatgtgcttggtatagaaatttgctgtcttcagtataccgccttccctgtttcaacctccataattaacagcaggcatactagaaatgcagaaatagagattactattttgtctgtcatttcattcatttccaaaatattgaaactgtaacaaactactcaaataagagttaaaataatatcagtcacaaccatgccaatctacaatccctaatcaatttacattctaattgttcataattgtgctacatgaagataaatgttttcttgactgaatattaaccaaatgccctcaaactacaaatagtatgcaactgttgtattttagtagaaaacctattccattttcagattgatacaatgcagacattttaaatcttataaactcctcgatctttgccaagtgcgttcttttatttgctaggaggcatttgtccattcctaacctttttacctccagaaaataaatgacacatgtgacttgaaaattgaatcgatcttgactgaaaaagaaataataaaaatagctaatgtctttatcatctctgtagcaagcctacagggcagatactgttgctgcttcagttttgcaagatgcattatatcttgctaatcctcaataaatatgaaaaagtgataatttcacagctaagaattgacaaactggaacacatttctcatttgaatagacaagataagcagttctcaccagtgctgccatctctgccttcgggtgtgttgtgtcccaggcaggcactgtcggttcattcataggtcactgctattttatttctgtttgtctatttctggaccagaactcagattcacatccagacagctgcctgtcttaaagaccattctgctctaccttctgtgacataatttaaagaaatgagtagccccaattaaaccattgcaggtgtaaatttcttgcctggagagagaattgagaaatgaatgggattcatgaatataaattgggctctccttacactaaagttttcattttgaaatggtagagtattcactccccacataaatctgtatttgccttaagtgtgtttaccatgggaaccccagtgtaaagctcgtagcccattgctatgcataactgaatattaaagttcacaaatcattaggcagaggaggcctggagaaggagatgctgtggcagggcagctgcatctgggctggcagcaaagacgaattctgctctcacaggctctgcacctttactaggatggggccacccaacctgcccactctttttctcttcttaaatattatttaatattaaggattgcttcttcttccaaccaagacattctgctttctgaatgtcttaacagctctattattttcccttcacccaattttggtttagaagatggtgtgttaagtgaatctcttataggccacctaatttattttcaaacaaatgcctctgtgaaaggatggaaggattcaataaggaaatacgtaaataatcttcagacgctaagcaacccgcttctctttcccccacttccctcttttccttccctcctttcctctccatcttttttgttgttgtttgtttacattgtaactgtatatattctgtgaagatccattgaggccaattggcctttcagtgtataaacaaatataatccaaagtactaaatggcactcctctcattttcaacttgtgctttcaatcttcagccagaagtaaggccttattatattcacaattatatggacttgagaatgagtgtacattgcctgctctttgctgtagaactaaatcagaaggaaatctgttggttataagttttctatgatcatcccaagttattttcttatgtatataataattcatgctacaaagagcttggtgtggtttggaacaatgtcataataaaatggtaaaatagccacagaatttttcagggcaattggatgtatgaatcacaatgggagacctagacaatgaaaaacaatcggaaacaattttctgcaattaatgtgaaaataattttctctcaagtctctctgcaaatgagaacagagaagtagaagtagtgaaaatggtaatatgggattaatcacatttcttgttcccaggtctgatggtttttccttattgtataaacttcaaacactgtaggtatgcagaactctgagctgatcttgttattcttaaatagacctgccaagcatattaaaggaaggttctgactgtctgctgtggacagaatgtagctcaaggaaatgtggttattacccttaattatattcgtaatatgtggtgtctttacaataatttaaaataattcagtaaattgaaaccactatgaagataatttagggtaataagaatgtaaaacaatgggacacataaggaaggtcaaagggtagctttttagattacacactggttccacttgccaattgtaggcatagggcagacctctcaaattggccttttcccaagcttgctctccaattctccaaactgaggacaccttgcttctatctcatttgatgaactgagccaatctcctaattcagtgactatttgcaagccaaattttcataatatttctgaaatgaatgaagatacattttgtatatccaaggatagttaagtattttcttttataaagactataatataatgtggtccttctttaatataaagactctcagaggcactcaatatatagattacttatgaatgatgcatgttgattagctagtttttaacttttggtttcaatttttaaaatccgattgtgaaagttagttcatatttgtgttaagaaaatctaggattttaaagattcttttctctcagagaattgtattaagatagcagttccacttactcttaggtgctctacatggttaataatatgagctctggaaggagcttattatacagcataaaatgaatgtctttcatttctctaccactgtgtcattttcacctaaatcataactttcttcccaacatttataagaacaatcgacaggcttcctttataaggatgcattttaaaccactcattgaagtgaggatttaaataactagaataaatcaattctggcctacctaaaaaaataaaaaaagacaaatgaaggctaacaaactgacccacccagaaagacatgaacagataaatttttgaatattgtattctttattatctattatatgtattaatacttggtcacatattggagtattttaccaaaaaattctctcagaagctagtggtgaaacagaagaaaagcatcacatgcgtcccacttgctgttgcctttttgtctaaggcagtggttatcgtgaattcctcagggtagcaagtcatttggttcactaggacataaaaaaatagaatttatccaaagttaatgggctgtttggtggtctctatgtgtgaaatgagattgtccaggagaagaggatagtcagggaatgagtcaatttaattttaaaataacttgataatctgtgaattctccaaatatcctcaaaaccaaagaaaaagccaaatatgaaaggtgtaatttatagtagtcaattggtatcaatagagtcttctgtttttgtgccatgaataatttatcattgtcacatgtattcaatagaccattctgcataacaatagaaatgtcagtgaatttttaaagccataatcttgttcactcttagaagtaaaaaaaagagaaaatgcattcttagggaataaacatctgataacacattctgaatgtggagactgagatgtctgaaggctgccttttgaaccagtagttttaccccatgaaacatcactgtgttctttctgcacaaccagttcaaaagatctcttttcttcgcaggttaccagccagtcttgtctggtcaacagggattccaaggcctaataggagtgcagcagccacctcagagtcagaacgtgataaataaccaacaaggaactccggtgcaaagcgtgatggtttcctacccaacaatgtcttcttatcaggtgctcataagcagcttggaaaattgtgggttttaaagtagaatttgccaaagtggaagctgtgggtctgtccctggtttgggtggctggctgggtaatgcgtgcttggtccataactgttgataatttactttgaatcaagattataatagaaaagtagaaaatgcaaaatacatgcttctgtcactactgtggcttttgaatgctctcctaagtttatttccatataacttcatattcatggaagaaaatacattagtctacagttttattcataaagacctttggaaattttattgcattttgcttattggtagaaagtcctcatgacaaattcccattcatttttgtacacacccaaataaacttcatttttccataactttaagttataagagattttaatatggcatctcagattcatttaaagggcatttctggagcctagcaactacattctctggactaaacccaagttaagtattttaaaagtgttatgtatccttttgtgatgtatattctaaaataccccagaagtagaaataaagagttagtgaaatggtataataattaaatttaactgtaccaggtgcttctgaccctaaaggacctattctagggcccctaccctactattctgattcacattgcatcaacttctacctccacctccacaataagtgttctctaaagttgcaggttgagaatatagtaggtgcccaggacaaaagcccttttcactgtggaggactccaggccactttgcataaaatcagaaagggaacatggcttttcaaactgagagaaacccagagtggaagatctagactatagtttctagaggtcattgagagagaagggaaggaaactcagaactaacaccttctcagcatctactgcattccaggcagtgtgccaggcactgtacaccatcccttcaatcctttcaatggtactttgaagcatgtatgtcattatcgcaatggactagggaattagagaggttaagtgactttcctaatgtgaaacagccgataaatggcagagctggaattgatgacctgttaggtctaactcaaaagtttgaatatttttcatgacaccatgttgtttattgtacagaccaaaatagtctcttcatacagggttcttgcttgtgtctttttacaggtgccaatgacccagggttctcaaggactgccccagcagtcataccaacagccaatcatgctacctaaccaggcaggtcaagggtcactcccagccactggaatgcctgtttactgtaatgtcacaccgcccacccctcagaacaaccttaggctgattggcccacactgcccctccagcactgtcccagtgatgtcagctagctgcagaacaaactgtgcaagtatgagcaatgctggttggcaggtcaaattctgagagctctggctgtggtacatttcttcagatatttctcatggcctttgatggaagaggaacaaggtgggaaaactggctgaggacttaagtattcactcaacactcaaatgattgctgctggtattctgtaaaaaataaacaaagactaatatacacgttagctggttaatggtgcatatttctgtcatgtctgctaggtatgcctttatagcttagctagtgacatgaattcatcaaggtaagattttctcctaccactgaataccactgtgtagattataatatccctaatttggattagttttgtactttgtgttgagtttgtgatgctaaaagtatttaaaaattatatactaaatcacattgtaccaaagctgtaatggaaaagcaaagaagaattgatgaattgaaggaataatttatatacattatagagttttcttttttaatggatatatactgtattgtagtgtttaatcaaaataaaactatttgaccttatggaggaaggtcatgtttttaccaccagtttggttcactatgtcttccaatgtgtgttttcttatgtgtcactgtattcccttcaaacactatttcatgaataccacatggaaaaggtatttcaggcatttataagtaaactgccatcacatgggaatatgccgtagcaaagacttaacgaactgtagtttattgtcataatactaaagggtcctgaaaataagatggcatccatttgattcattcatggagtttgcagttttaaaatatataccttcctattaattataggactattaaaagtatgtagttatacttcaccaactaggaaaacctgcatgtcatcattaacagcagccatataccaaaccctgttctaccttcatgtgagtttcattatgtacctgaaaacaaggtaactttgtttagaggaaaatcagaagaggcatggtctaatcctgcctgttttattgggtcatagaatggaaagtgccactagtattgacagtgagtcagtaattcaaaagtgctaatgtttgtcccagtaatttaaaacaaagtaaatatagcaatgatttaattgcaaagatctagaacattggcaattccatttagatgaagcccatgtctacctaatgtctctctgagaaataacagagctgtgaactctgaggtttggccctcctggaagatattaatggggaaataaaacccctgtgttttcactttaatatcacagtacaatgactaatagttttgtattttatattttctatctaaaaaccatgattaccaatgagaggaatatagggagtatatctggataatttctattgtttttcatattatcacattctatgttagatttgctgtttttatgttgttcagctgtgggtagagttaagcagccggttaaaaactctatctagcagattaccattacttcattctatactattgttttctttttcctttgaaagggaactcttacatatactctaattggctttattccttatgaagtctgttccatttttttcagatttcagtctactagtatttccgtggtctactctgaccatgaaaagtgttgtaacaaaaggatgttgcatttttttcttatcgagccattagctactctgaaaaaagcactgtgtttgcttaattaataccttcccctaatggaaatatgggattggcaaatattctccatttagctttctgatgttggcagttatcctaaatttaagaatccaaatatgagcctgaatatttattttttccataaaattttgcaaacttttgacattttctttcaagatctttagaattactgaggcttcttttctatggatttgaaatatatggtatgttagtggtaaagacagggctttacacctaaagaaatttcatttgaccacttttctccaaagatgtagcagtatctcatgtttagacatttgatatttattgtataaatccatttggatattgttgcaggccaaaccttctttcctactttcacaaaatactcctatacatctgtcttagtccatttttgtagctataacagaatacctgaagctgggtaatttacaaagaaacaaagtttatttggctcaaggtgctgatggctggaaagtccaagattgggcagctgcatctggtgagagcctcaagctgcttcaactcgtggcataaagcaggagagcagctatgtgcaaagagattacatggtgaggaaggaagcaagaaagagaaaccaacaagagtgagaactcactcaaccccacaggagggcattaacctgtttatgagggatctgccccagtgacccagacttctttcattaggccccatctcccaaccctgatacattggggatcaattttttttttttttttttgagacggagtttcactcttgttggaacaagagtgcagtggctggagtgcaatggcatgatttcagatcaccacaacctctgcctcctgagttcaagcaaattctcctgccttagcctactgcgtagctggaattacaggcaagcaacaccatgcctggctaatttttttgtatttttagtagagacagggtttctccatgtaggtcaggctgatctcgaactcccgacctcaggtgatccgcccgcctcagccacccaaagtgctgggattacaggcgtgagccaccatgcccagccgaggatcaaattttaacatgagtttttgtggggacaaaacacatccaaaccatagcatcagcatcatggtattccaaatcttagattatgcttactgttttgttgcattagaattttggggatggctgtgtagaaagatggttttattagtgaagcatttccaaaacttattatcaggagaacccttaatttctcattttagttactaatcttatcacaatcacattttgtaagtacagattattcagtttataaacatatcaagatataggaaaacatatagatatataaatatattgatatattgctatacttattcctaataattctctgtaaccctatatgaatgtaaaagagaataagaatgacttatgcattcatttttttcagcaaaattttattgcatactggattatattccaattatgtggcaccactcaaaacaagagtacatataaatttaaagcacttaaatttatcttgtaaatgttatcatacattttgttattgtttgatagttgtaactaaatgttgtaacaagaacaccaacacatttaagccataatcatgttattgatttaatatagttctacagggtatgaggtgaggcagcaaagtgtgttatacaactttatggaaatgtgattatgtagtttataataaaaatatttggaagacttagaacagaattgtaaatcatcataaaaaacaagtgcagtatctatgaaccagagcagtttttcaagagagaattgaagaatgaagcaaatacaatcaaggaaaaaaatgctgcagcagaaatggattttgagatttaataaatgcatatttagactctgcttccacttttgctaacagctaaagtgcaaggggacactttcatactcccattctcctattacttgtgttccacattgtattagtccattcttacactgctataaagaactatcagagattgggtaatttatacagaaaacaggtttaattgactcatagttcttcatggctgggtaggcctcaggaaacttacaatcatggcagaaggtgaagagaaagcaaggcatgtctcacatggtgacaggagagagcgagcgagggggaactgtcacacacttttaaactgtcagatttcatgagaactcactcactatcatgagaacagcatggggaaaaccaaatccatgatccaatcacctcccaccagttgttcccccaacacatggggattacaattagaggtgagatttgggtggggacacaaccaaaccctatcacatatatacaggtacaaacagtggacaaagctgcaggcctacctcttacctgtgccttggcactcacatcacagcaccttgatcatttataaataaaaaataaagcattagaaatacttaaccctcaaggtgttattaaaacagatcttttgggttttgaagtcaagtaatatcttatatataaatgtaagcattttatataaatattaaatgaagaaatttttaaaaattccatggaagactgtttccttggaatatgtatagttatatgaaacagactgttgcaaggacaatcataattgagaaacaaggtaaaacaaggttaaacaatctttccaaaagctaccaaatttttggaaacctttaatttatcactttatattataaatttttaagaagaaggcataatttgcatagtttctccaacatatttgaacacagtatcttttgttcacagaatatatcaaaagactaatattgcaagaaccatttgttttttttaattgtgttagagaatcccaaaacaagagcacaaatagatctcttttaattccatagaaacagtgttctgtatcaaaatgtaatatcgcaaccctacttccaacggtggcatattttggtaactgctgtagtgtgaactattgaactatttcttctgtgaatatgtgaatctggaaggtcgtgccatagtgccagactttctggatctttatttaattcttaatgttgaagggcttgatatctatatttatatcttcaattatggttatagtcatatagatatacttgtctctactgatctcttacacctttatgtgattgtaaaagagaacgagagtgattacgcattcatttattcagcaagtttttatttcacacttactaatttcaagacctcgagccacagtctatggagctcctacccttaagaagcttatgaatttttgaaatacattatataagtatataaataaataaaaatataggaaattaactataggtctcatgtgaaaaatgttgtaaaaatatcttagagaaagaaacgatggcttctggctgtggttttatgaagcttttgtcgtggattctattgggtagatgaaatttgaacacacagagataggatgggtgggttataaccccaaccaagataaatgcctgcatggaaaagaaagaaacatgggaaagtatgcagtataatttaggttgcttagagtaggaagtggacagctagaacaaaaagaggaggcgtacagggaaattcataatgggcctgattggcacgaccttaaacgccaggcacagagttaacaggcacccaccgactcctgcagactttttattacaagatgatatgacctcagcatggtttataaagaagtataggtctcaaaaagtaggataggttacacttgaaagtcctcttctttcagaaagtggagacgaatgcaacaataattaaaatttgccactgagctacagctaccattagcattgttgggaaaattcaaaaatgatttctagctccagactcttaacactgagccactgagcagttctgttggatggttggatgcacagcaatactttagagatatatgtctcacttttccctcttggacacgaccttctgcatcagggcacataagtgccctgtcttaagctgcatcacaaggcatagtcactataatctgtcagggaaaaacaaatagagactaagctggaattggaagcagcattggaagggctgccacgtctccatcacaatatattcagtatcaatgcacaatatgcagtgaaatctaatatcagctccctattcccccttgtataaaaaaatggtgacagtactttttcattatggctcagaatctttttttctggactcttctggatgccacttcttccacacaagattagaaatctttgcttcttcccatgttattctgtccaccttttactaagaaaggttgttctctttagagttttagcattattttctagttttctgctttagtttttgtttcaagttcaaatctttatcgcctgatttcagcggggttttgcaacctccaatcttttccacagaaatatttgccactgttttgtgtcatcagcggcaagagctttcactcgttgagatgggtcttctgcttttcccaataatgtgtaccttgtaggaatgagaggcagctgatactcttcttctgtagaggaaaatcactaccttattgatatcgtaacagaaaactgattcttctgctgggcttgatggtgcttcctctacgacaatattaaacacctccctgacaacagaagctcagggaatactttgacatttgtgtttgttatttggtttgttttgttttaatgctttattccattttaccctcagtgttggaatgggagagagaagaggtcagatacagcaaacagaaggagatataaatctgagtaggaatgaggctcaatctgaatttgatggatagtcaatgaacaaattcagcaagtattcatgaagatgtgtgggcagatgacccacaggcccagtccaatttgtctagatagcatcctactggggaagagctcaactttttaaatactccaggcttctcacctttagcgtctggcgtatatagatgagagggcacgtagggattagggatggggaggagaccagggaggaagaaggtaaggcatatatgtataaaggttctggaattaaaagtagggaagtttattgtgaagcactgaatcatgtttctagctaaaagatccagagcctccatcagaatagcctaataaaatagatctgatggttaaatgtaggtgatacttatggccatatcactcaccctgtattcccaaggtttttattgcactaatagtttgaaaccaccaacgtttgtgttatcatgatgctaccataagactctctacccccttgcagttctattttttaacatgatatttgcagttgtttctcccatgttattgagaaagtcagtcagtaggcatctctgtgtctgcaaatgtgtctctcccctttgtgtaaaaggttagtgaacctcaactagtacaaggttcacattttttgaagaaatatcagtgtgtttgcctttccattagagggtcacttagagaaactctatgtacatagtgcattcttggtcacttgcctcagtcccattaattatttctaagctagtggtgtcatgggatccctacagtgtagctcctccagctggaagtttctgtggctgttgccacctttgcccaagttttgcttgggcctgctgggcttattctgcccactcagcctgtcaggctgcacttggctcatgctaccagcccagatgccacactgccaagggtgtggagtggcaaggggtgtgtgaatgagagagcatgggatccagccattgtgcacacggtggcacaccagttgctgtggaagggtaggcagctccaggcaccagcataggcatcagctctgtgcaaggctgtggtttgaccaggtgtaacacaagcagcttccactgcgggcagtggggaatgcaatggtgcctggaagcttggagacaccaggaaccacagagccccaaagggggtgtcacaccctggctcaaggagcccttaagtctggcctccctgaaaggccagagctcttctctccttgtcacttgcaatgtggcaagcacaggcagcaggggtggggagtgttgggcatgtttcagccctgtttgcattacatacatgtctttcagttccaccattcagcaggtgttgagatcttctcccatgtcagggaagaatgaggtatgcagacaactagagggtgagcaaggtggagaggtactttattgagcacctcagtatagccctcaggagactcagagtgggtagctcctttccacaggcagatcatcccaatgtctgcagccctcagtggagaggagacccggagtgggtagctcctatctgtaggcaggccgcctgactctacctgagtctgactgagtccgggggtttttatggggttcagaagggaggaagtctgtgttaattggtccatgggtggccacaggcaggcccagtaaaagaaccataagttctcacttggagccacgactccactgggaacatgggggacagcctggcagggatgccggtgtttgcagccgtggctgggtggctgcagctgtgcccaggaggatggggctcccatcccacaaactcagaaggcttaggtggtgatcccacaatctccgtggagcatgcagccctggtggcaccttccctgctgcagctgctatcttcacagctaccgctacagacaggctgctgctgcaatctgtggaaatttcagaaacaggaaaatcacctgctctctcaaaaaacaggatgctcatctgtcattttcaagtgttttaaatttttgattcagaagaataaagctacattttcaaatgaaatgtgcaagccaatttcatccttttgaaagagaaaggaattagttaaggtgcttaatagtaatgtaacagagagcaatggcctgagactgaaaaaagtagcgatttaaattggacattaagaacatttcacttaaagcaaggccaattatacagtgaaataacttcctaagggagaaacagtgagatgccattaaaagagttgttaaaaggaacatagataaaaaacacttgcagctgaatctgctgaaggatcattttatgatttattgccttgctatgcctatatgtctttctcactggagatttacctggcttggttagcttcctttacatgctggcaagactcatattgtaccagaggactaggatgtctgtattccatttttctttatgcaaaatgtaaagctctaaatgaatttggtgaaagaggcaagtggaatgtagggagctagtgttgtgaaaaatctacattgtgttagtgccctagggttatttttggcatacacatgcatatgcacacacagacacatatatacacacaaacaaacatgtatgtctatttaatgtctaattctgttgagtatttatctatatattattaaattttatttaaactttcttcaagaaattaattgatggttttttttcaaattggtggctcttcatcagtctgtattcctgggcttggggacgcatacataacaaggatatgatgtggattcctccacactgccatattgctatacctacaacacgggatataaaaagcatcctttaacttatgtaagaagtcctgaatttgaataccatcccccaccaccaccacatacacacactcaaacactcgctgtggaatttgtgcaagctccttaaccttctgcgattttacattctacatttgtgaaaggaaaagaaaaatgccatattggctaagcagtgttcatttatagaggttaagccaatttttattatacttttgtatattgttctaaatgaaccaaaaggctgacatattgacctgaaagattccctgaaattcttactattaatgtacttcctggaaacctatacatttttagtggatattttgagttttctcttatgctgtcttaaagtgccttcacaaaggaattcctctttggagacttctgttaagatcaggctgtttcccaactcattcaggagaaggggcatgcctgaccctcactcagcctccgttggttctcaccactttcctttcactacaactgcattcgaaaccccatcttcctgactgtggggtccatcttctttctttagacaggttattcagtctttgggtcattatctactaatctccaaagtagagataatgactcctccatcacttgatggctttaggaacaaagtgagatttcagataggaagctctgtctaagcatccatccctggagtttccagtgcagtaccatgtccctaaatgctctgatcaattgtgaaatttcggtgattcatgtccagtaaatggagtgggtggtagggaatgagactttacgatttcatgtatttaggaagatctaaaagtgtctctgatgatcagttagattagggttagatgacctttgagatccatgacagctctaagagacactaatgacctatgtagactatttctagatcatgatacacaaaatccaattcatctaggttattcagggcaataagggtgtttagggtaattttctgagtgtaataagggatactcaaggccatggagattttttttcttttagaaggtacaaagctttcagggacagatagaatttggagagatctgcaaaaaatttagtcatcctttacagaatttatttaaaaaattaatattactgtccacctgcaggccttatactataaggaataacaacatttgtatagtagtcattgtgcttcagagggtgatgcaacaagcatgaaggtgagggtgatgtgtgtcgatgttttaattaaaggcaaactaggcagaaagcctgctttgtccaggctgccaggaatgaccagcccttcttgtccagtgcatgtttttcctaggcattgtatccttggagat

SEQ ID NO: 2454 - DNA, 2019 bp, Homo sapiens
agagtgagcggtggagggagtggaacaaggcttcgtcaagagtccccaggagtccaggggcgcccccgagacgggttgacgatgtgtcacactgtgtaagggaatcgcatggagatgggcattccgaactgttaatggggacatgggactccagttgtctctgatcacttgtgtggattttcctggcgtagaacgacagaagccgctagtaagtcgccaagacctacagcaggaattctgcaccaaagggcataaaatcttgttattttaatttgcatctgggagaatgtctgagcaaggagacctgaatcaggcaatagcagaggaaggagggactgagcaggagacggccactccagagaacggcattgttaaatcagaaagtctggatgaagaggagaaactggaactgcagaggcggctggaggctcagaatcaagaaagaagaaaatccaagtcaggagcaggaaaaggtaaactgactcgcagtcttgctgtctgtgaggaatcttctgccagaccaggaggtgaaagtcttcaggatcagactctctgaaaactgcaaatggaaaggaattcaaaagaatttagattaaaagttaaataaaaagtaggcacagtagtgctgaattttcctcaaaggctctcttttgataaggctgaaccaaatataatcccaagtatcctctctccttccttgttggagatgtcttacctctcagctccccaaaatgcacttgcctataagaaacacaattgctggttcatatgaaacttaggaaatagtgaataaggtgcatttaactttggagaaatacttttatggctttggtggagatttctcaatactgcaaaagttgtccagaaatgaatctgagctgatggtgactttaagttaatattattaatatatcactgcatatttttacccttatttttgctccttacagcaagattagtaggttataaaaatttaaatttaaacaaaattatttcatgacaaaatgggaaacttcacatcatacttatttttgtttgcctttcaggcatcatattagcttttataaaaaatggtcttgctgctgaaattgtacttattttatcagaggctgggtgcagtcaagacaaaagtaaaatggtttacctgagcccaggggagggaaaattgattaagatatcattatttttgtttggtttggttttgcttttttcctcttactttaattgaaatactctgaattcccctcatggaaacagagagcattgagagcactttctttaaaaggaccaaaaataaattcctaatagattttgtcctaagagagtgtttttttttctagcatcattttctttacatgccactcatgtcataaggcatggacaggctatctttcagtggccattactatgtttcgtacacatgctttattttacttgggctctgagaaatgtgtggctttccttcagcattttatttgtgcttctctttttaatggagattgaaaagggagaataatgtgaatatcacggcttatattattaaatgttgattgatggcttgtaatgtactgcacacaatatatgttaactctgcagaatgacagaccctgggagaagtaatgccccagttgtcccccactcctaatgccaggcagagaaggacagcctttatagacttaatctgctttttgtcccatttgacaaggtaccaggaggaaattttttaagggatcaactgtatcacagtgcccactctggacctaagtctagtgtatccatacaattggtgcagagaaataaggtgtaaatggtgctttgttcctgctggttccaagctcagaaaccaagactagctttgtaggagagaatgagagcctgcaagcctctctttggattggctgaggagtggtgggagcagggggttgatagaaaacatccagacacacatataagcaagtggccgtgctacctttttagagaataaagaaacagacttttgagtttatatgcaatgccttc

SEQ ID NO: 2455 - protein, 89 aa, Homo sapiens
MSEQGDLNQAIAEEGGTEQETATPENGIVKSESLDEEEKLELQRRLEAQNQERRKSKSGAGKGKLTRSLAVCEESSARPGGESLQDQTL

SEQ ID NO: 2456 - DNA, 2006 bp, Homo sapiens
taacagattttaactctgaaaagccatttccagtgtctatagactattgtgagcctggagaagtagcatttagttgggatagcttcactagagctgcctgccaaagacttccttccacaggatcttgtcgcaccagcaactgacaggagcttgggagctcgggagcttgggagagggcttatgtttttaataatgtagctgtcagttcgaagcctggaaatgttgaccctcaaagggcataaaatcttgttattttaatttgcatctgggagaatgtctgagcaaggagacctgaatcaggcaatagcagaggaaggagggactgagcaggagacggccactccagagaacggcattgttaaatcagaaagtctggatgaagaggagaaactggaactgcagaggcggctggaggctcagaatcaagaaagaagaaaatccaagtcaggagcaggaaaaggtaaactgactcgcagtcttgctgtctgtgaggaatcttctgccagaccaggaggtgaaagtcttcaggatcagactctctgaaaactgcaaatggaaaggaattcaaaagaatttagattaaaagttaaataaaaagtaggcacagtagtgctgaattttcctcaaaggctctcttttgataaggctgaaccaaatataatcccaagtatcctctctccttccttgttggagatgtcttacctctcagctccccaaaatgcacttgcctataagaaacacaattgctggttcatatgaaacttaggaaatagtgaataaggtgcatttaactttggagaaatacttttatggctttggtggagatttctcaatactgcaaaagttgtccagaaatgaatctgagctgatggtgactttaagttaatattattaatatatcactgcatatttttacccttatttttgctccttacagcaagattagtaggttataaaaatttaaatttaaacaaaattatttcatgacaaaatgggaaacttcacatcatacttatttttgtttgcctttcaggcatcatattagcttttataaaaaatggtcttgctgctgaaattgtacttattttatcagaggctgggtgcagtcaagacaaaagtaaaatggtttacctgagcccaggggagggaaaattgattaagatatcattatttttgtttggtttggttttgcttttttcctcttactttaattgaaatactctgaattcccctcatggaaacagagagcattgagagcactttctttaaaaggaccaaaaataaattcctaatagattttgtcctaagagagtgtttttttttctagcatcattttctttacatgccactcatgtcataaggcatggacaggctatctttcagtggccattactatgtttcgtacacatgctttattttacttgggctctgagaaatgtgtggctttccttcagcattttatttgtgcttctctttttaatggagattgaaaagggagaataatgtgaatatcacggcttatattattaaatgttgattgatggcttgtaatgtactgcacacaatatatgttaactctgcagaatgacagaccctgggagaagtaatgccccagttgtcccccactcctaatgccaggcagagaaggacagcctttatagacttaatctgctttttgtcccatttgacaaggtaccaggaggaaattttttaagggatcaactgtatcacagtgcccactctggacctaagtctagtgtatccatacaattggtgcagagaaataaggtgtaaatggtgctttgttcctgctggttccaagctcagaaaccaagactagctttgtaggagagaatgagagcctgcaagcctctctttggattggctgaggagtggtgggagcagggggttgatagaaaacatccagacacacatataagcaagtggccgtgctacctttttagagaataaagaaacagacttttgagtttatatgcaatgccttc

SEQ ID NO: 2457 - protein, 89 aa, Homo sapiens; identical to SEQ ID NO: 2455

SEQ ID NO: 2458 - DNA, 2578 bp, Homo sapiens
attgcagccaagaatacacggattctacaggcatagacttacacgagtttctgattaacacattaaagaataattccagggacaggatgatacttttgaaaatggagcaggaaattattgatttcattgctgacaacaataatcattataaaaagttccctcagatgtcatcgtatcagaggatgcttgtccatcgagtggcagcttattttggattggatcacaatgtggatcaaacaggaaaatctgttatcatcaacaagaccagcagcaccagaataccagagcaaaggttttgtgaacatttaaaagatgaaaaaggtgaagaatcccagaagcggtttatcttgaagcgagataactctagtattgataaagaagacaatcagtcagtttgctcccaggaaagcctttttgtggaaaacagtaggctcttggaagacagtaacatatgcaatgagacctataagaaaagacagctctttcggggcaacagagatggctcagggagaacatctgggagtcgacagagcagctcagaaaatgaactcaagtggtctgaccaccaaagggcctggagcagcacagactccgacagttccaaccgcaatctaaagcccgccatgaccaagacggcgagttttgggggcatcacggtgctgaccaggggtgacagcacttccagtactaggagtaccgggaagctgtccaaagcaggttccgagtcttccagcagtgcaggctcctcaggatcgctgtcccgcacccatccacctctccagagcacacccctagtctcaggtgtggcagctggctctccaggctgtgtgccttatccagagaatggaatagggggccaggttgctcccagcagcaccagctacatcctccttccacttgaagctgcaacaggcatcccgcctggaagcatccttcttaatccacacacaggccagccctttgtgaatcccgatggaactcctgcaatatacaacccacccaccagtcagcagcccctgcgaagcgccatggtggggcagtcccaacagcagccaccacagcagcagccctccccgcagccccaacagcaggtccagccaccgcagccacagatggcaggccctctggtcactcagtctgtccaggggctgcaggcttcctcccagtcagtgcaatatccagcagtctcttttcctccccagcacctcctacctgtgtctccaacgcagcactttcccatgagagatgatgtggcaacacagtttggccagatgaccctgagccggcagtcctcgggggagactcctgaacccccatcaggtcctgtctacccatcctcccttatgccacagccggcccagcagcccagctatgtaatcgcctctacaggccagcagcttcctacaggaggattctcaggctctggccctcccatctcccagcaggtcctccagccccctccctcaccacagggatttgtgcaacagcctccgcctgcacagatgcctgtatattattacccatctggtcagtaccctacctcaaccacgcaacagtaccggcccatggccccggttcagtacaacgctcagaggagtcaacagatgccacaggcagcacagcaagcaggttaccagccagtcttgtctggtcaacagggattccaaggcctaataggagtgcagcagccacctcagagtcagaacgtgataaataaccaacaaggaactccggtgcaaagcgtgatggtttcctacccaacaatgtcttcttatcaggtgccaatgacccagggttctcaaggactgccccagcagtcataccaacagccaatcatgctacctaaccaggcaggtcaagggtcactcccagccactggaatgcctgtttactgtaatgtcacaccgcccacccctcagaacaaccttaggctgattggcccacactgcccctccagcactgtcccagtgatgtcagctagctgcagaacaaactgtgcaagtatgagcaatgctggttggcaggtcaaattctgagagctctggctgtggtacatttcttcagatatttctcatggcctttgatggaagaggaacaaggtgggaaaactggctgaggacttaagtattcactcaacactcaaatgattgctgctggtattctgtaaaaaataaacaaagactaatatacacgttagctggttaatggtgcatatttctgtcatgtctgctaggtatgcctttatagcttagctagtgacatgaattcatcaaggtaagattttctcctaccactgaataccactgtgtagattataatatccctaatttggattagttttgtactttgtgttgagtttgtgatgctaaaagtatttaaaaattatatactaaatcacattgtaccaaagctgtaatggaaaagcaaagaagaattgatgaattgaaggaataatttatatacattatagagttttcttttttaatggatatatactgtattgtagtgtttaatcaaaataaaactatttgaccttatggaggaaggtcatgtttttaccaccagtttggttcactat

SEQ ID NO: 2459 - protein, 649 aa, Homo sapiens
MILLKMEQEIIDFIADNNNHYKKFPQMSSYQRMLVHRVAAYFGLDHNVDQTGKSVIINKTSSTRIPEQRFCEHLKDEKGEESQKRFILKRDNSSIDKEDNQSVCSQESLFVENSRLLEDSNICNETYKKRQLFRGNRDGSGRTSGSRQSSSENELKWSDHQRAWSSTDSDSSNRNLKPAMTKTASFGGITVLTRGDSTSSTRSTGKLSKAGSESSSSAGSSGSLSRTHPPLQSTPLVSGVAAGSPGCVPYPENGIGGQVAPSSTSYILLPLEAATGIPPGSILLNPHTGQPFVNPDGTPAIYNPPTSQQPLRSAMVGQSQQQPPQQQPSPQPQQQVQPPQPQMAGPLVTQSVQGLQASSQSVQYPAVSFPPQHLLPVSPTQHFPMRDDVATQFGQMTLSRQSSGETPEPPSGPVYPSSLMPQPAQQPSYVIASTGQQLPTGGFSGSGPPISQQVLQPPPSPQGFVQQPPPAQMPVYYYPSGQYPTSTTQQYRPMAPVQYNAQRSQQMPQAAQQAGYQPVLSGQQGFQGLIGVQQPPQSQNVINNQQGTPVQSVMVSYPTMSSYQVPMTQGSQGLPQQSYQQPIMLPNQAGQGSLPATGMPVYCNVTPPTPQNNLRLIGPHCPSSTVPVMSASCRTNCASMSNAGWQVKF

SEQ ID NO: 2460 - DNA, 3270 bp, Homo sapiens
agagtgagcggtggagggagtggaacaaggcttcgtcaagagtccccaggagtccaggggcgcccccgagacgggttgacgatgtgtcacactgtgtaagggaatcgcatggagatgggcattccgaactgttaatggggacatgggactccagttgtctctgatcacttgtgtggattttcctggcgtagaacgacagaagccgctagtaagtcgccaagacctacagcaggaattctgcaccaaagggcataaaatcttgttattttaatttgcatctgggagaatgtctgagcaaggagacctgaatcaggcaatagcagaggaaggagggactgagcaggagacggccactccagagaacggcattgttaaatcagaaagtctggatgaagaggagaaactggaactgcagaggcggctggaggctcagaatcaagaaagaagaaaatccaagtcaggagcaggaaaaggtaaactgactcgcagtcttgctgtctgtgaggaatcttctgccagaccaggaggtgaaagtcttcaggatcaggaatcaattcatttacagctttccagtttttccagcctgcaagaggaggataaatctaggaaagatgactctgaaagagaaaaagaaaaggataaaaacaaagataaaacctctgaaaaacccaagatcagaatgttatcaaaagattgcagccaagaatacacggattctacaggcatagacttacacgagtttctgattaacacattaaagaataattccagggacaggatgatacttttgaaaatggagcaggaaattattgatttcattgctgacaacaataatcattataaaaagttccctcagatgtcatcgtatcagaggatgcttgtccatcgagtggcagcttattttggattggatcacaatgtggatcaaacaggaaaatctgttatcatcaacaagaccagcagcaccagaataccagagcaaaggttttgtgaacatttaaaagatgaaaaaggtgaagaatcccagaagcggtttatcttgaagcgagataactctagtattgataaagaagacaatcagtcagtttgctcccaggaaagcctttttgtggaaaacagtaggctcttggaagacagtaacatatgcaatgagacctataagaaaagacagctctttcggggcaacagagatggctcagggagaacatctgggagtcgacagagcagctcagaaaatgaactcaagtggtctgaccaccaaagggcctggagcagcacagactccgacagttccaaccgcaatctaaagcccgccatgaccaagacggcgagttttgggggcatcacggtgctgaccaggggtgacagcacttccagtactaggagtaccgggaagctgtccaaagcaggttccgagtcttccagcagtgcaggctcctcaggatcgctgtcccgcacccatccacctctccagagcacacccctagtctcaggtgtggcagctggctctccaggctgtgtgccttatccagagaatggaatagggggccaggttgctcccagcagcaccagctacatcctccttccacttgaagctgcaacaggcatcccgcctggaagcatccttcttaatccacacacaggccagccctttgtgaatcccgatggaactcctgcaatatacaacccacccaccagtcagcagcccctgcgaagcgccatggtggggcagtcccaacagcagccaccacagcagcagccctccccgcagccccaacagcaggtccagccaccgcagccacagatggcaggccctctggtcactcagtctgtccaggggctgcaggcttcctcccagtcagtgcaatatccagcagtctcttttcctccccagcacctcctacctgtgtctccaacgcagcactttcccatgagagatgatgtggcaacacagtttggccagatgaccctgagccggcagtcctcgggggagactcctgaacccccatcaggtcctgtctacccatcctcccttatgccacagccggcccagcagcccagctatgtaatcgcctctacaggccagcagcttcctacaggaggattctcaggctctggccctcccatctcccagcaggtcctccagccccctccctcaccacagggatttgtgcaacagcctccgcctgcacagatgcctgtatattattacccatctggtcagtaccctacctcaaccacgcaacagtaccggcccatggccccggttcagtacaacgctcagaggagtcaacagatgccacaggcagcacagcaagcaggttaccagccagtcttgtctggtcaacagggattccaaggcctaataggagtgcagcagccacctcagagtcagaacgtgataaataaccaacaaggaactccggtgcaaagcgtgatggtttcctacccaacaatgtcttcttatcaggtgccaatgacccagggttctcaaggactgccccagcagtcataccaacagccaatcatgctacctaaccaggcaggtcaagggtcactcccagccactggaatgcctgtttactgtaatgtcacaccgcccacccctcagaacaaccttaggctgattggcccacactgcccctccagcactgtcccagtgatgtcagctagctgcagaacaaactgtgcaagtatgagcaatgctggttggcaggtcaaattctgagagctctggctgtggtacatttcttcagatatttctcatggcctttgatggaagaggaacaaggtgggaaaactggctgaggacttaagtattcactcaacactcaaatgattgctgctggtattctgtaaaaaataaacaaagactaatatacacgttagctggttaatggtgcatatttctgtcatgtctgctaggtatgcctttatagcttagctagtgacatgaattcatcaaggtaagattttctcctaccactgaataccactgtgtagattataatatccctaatttggattagttttgtactttgtgttgagtttgtgatgctaaaagtatttaaaaattatatactaaatcacattgtaccaaagctgtaatggaaaagcaaagaagaattgatgaattgaaggaataatttatatacattatagagttttcttttttaatggatatatactgtattgtagtgtttaatcaaaataaaactatttgaccttatggaggaaggtcatgtttttaccaccagtttggttcactat

SEQ ID NO: 2461 - protein, 811 aa, Homo sapiens
MSEQGDLNQAIAEEGGTEQETATPENGIVKSESLDEEEKLELQRRLEAQNQERRKSKSGAGKGKLTRSLAVCEESSARPGGESLQDQESIHLQLSSFSSLQEEDKSRKDDSEKEKDKNKDKTSEKPKIRMLSKDCSQEYTDSTGIDLHEFLINTLKNNSRDRMILLKMEQEIIDFIADNNNHYKKFPQMSSYQRMLVHRVAAYFGLDHNVDQTGKSVIINKTSSTRIPEQRFCEHLKDEKGEESQKRFILKRDNSSIDKEDNQSVCSQESLFVENSRLLEDSNICNETYKKRQLFRGNRDGSGRTSGSRQSSSENELKWSDHQRAWSSTDSDSSNRNLKPAMTKTASFGGITVLTRGDSTSSTRSTGKLSKAGSESSSSAGSSGSLSRTHPPLQSTPLVSGVAAGSPGCVPYPENGIGGQVAPSSTSYILLPLEAATGIPPGSILLNPHTGQPFVNPDGTPAIYNPPTSQQPLRSAMVGQSQQQPPQQQPSPQPQQQVQPPQPQMAGPLVTQSVQGLQASSQSVQYPAVSFPPQHLLPVSPTQHFPMRDDVATQFGQMTLSRQSSGETPEPPSGPVYPSSLMPQPAQQPSYVIASTGQQLPTGGFSGSGPPISQQVLQPPPSPQGFVQQPPPAQMPVYYYPSGQYPTSTTQQYRPMAPVQYNAQRSQQMPQAAQQAGYQPVLSGQQGFQGLIGVQQPPQSQNVINNQQGTPVQSVMVSYPTMSSYQVPMTQGSQGLPQQSYQQPIMLPNQAGQGSLPATGMPVYCNVTPPTPQNNLRLIGPHCPSSTVPVMSASCRTNCASMSNAGWQVKF
